(19) United States
(12) Patent Application Publication
(10) Pub. No.: US 2024/0043930 A1
(43) Pub. Date: Feb. 8, 2024

(54) TREATMENT PREDICTION AND EFFECTIVENESS OF ANTI-TNF ALPHA TREATMENT IN IBD PATIENTS

(71) Applicant: InnoSIGN B.V., Eindhoven (NL)

(72) Inventors: Wilbert Hendrik BOUWMAN, Eindhoven (NL); Anja VAN DE STOLPE, Eindhoven (NL)

(73) Assignee: InnoSIGN B.V., Eindhoven (NL)

(21) Appl. No.: 18/268,303

(22) PCT Filed: Dec. 9, 2021
(86) PCT No.: PCT/EP2021/084880

§ 371 Date: Jun. 19, 2023

(30) Foreign Application Priority Data
Dec. 17, 2020 (EP) 20214794.8

(51) Int. Cl. C12Q 1/6883

(52) U.S. Cl. CPC C12Q 1/6883; C12Q 2600/106; C12Q 2600/158

(57) ABSTRACT

The invention relates to methods based on gene expression levels to predict treatment response to an anti-TNFalpha compound in inflammatory bowel disease patients based on a pre-treatment biopsy, and a method of determining the treatment effectiveness of such treatment based on a biopsy obtained after initiation of the treatment with an anti-TNFalpha compound. The prediction is based on the determination of cellular signaling pathway activity, in particular a pathway selected from TGFbeta, NFkB, MAPK-AP1, STAT3 and WNT, preferably wherein the cellular signaling pathway is selected from TGFbeta and NFkB. When determining the treatment effectiveness, the cellular signaling pathway is AR and/or MAPK-AP1 if the IBD is UC and wherein if the IBD is CD, the cellular signaling pathway is MAPK-AP1 and/or NFkB. The invention further relates to the use of anti-TNFalpha compounds in the treatment of Inflammatory bowel disease wherein the treatment is combined with the method for predicting treatment response and only administered when a favorable response is predicted. Lastly, the invention relates to kits and uses thereof in the methods described herein.

### FIELD OF THE INVENTION

[0001] The present invention relates to the field of diagnostics, in particular in the field of Inflammatory bowel diseases such as Crohn's disease and Ulcerative colitis. The invention in particular relates to methods based on gene expression levels to predict treatment response to an anti-TNFalpha compound based on a pre-treatment biopsy, and to method of determining the treatment effectiveness of such treatment based on a biopsy obtained after initiation of the treatment with an anti-TNFalpha compound. The invention further relates to the use of anti-TNFalpha compounds in the treatment of Inflammatory bowel disease wherein the treatment is combined with the method for predicting treatment response and only administered when a favorable response is predicted. Lastly, the invention relates to kits and uses thereof in the methods and uses described herein.

### BACKGROUND OF THE INVENTION

[0002] Inflammatory bowel disease (IBD) is a group of inflammatory conditions of the colon and small intestine. Crohn's disease (CD) and Ulcerative colitis (UC) are the principal types of inflammatory bowel disease, with each a different auto-immune pathophysiology. Crohn's disease affects the small intestine and large intestine, as well as the mouth, esophagus, stomach and the anus, whereas ulcerative colitis primarily affects the colon and the rectum. In 10% of cases, definitive discrimination in not possible. However, this is important to decide the most suitable surgical therapy, determining the risk of cancer (especially in UC), and systemic drug therapy selection. This holds especially when targeted drugs are used that target the underlying pathophysiology and consequently only work for a specific disease or disease type.

[0003] Even when using histopathology analysis in combination with other diagnostic measurements and patient signs and symptoms, it can still be difficult to diagnose the correct type of inflammatory bowel disease and to treat the disease correctly. Treatment can be directed at inhibition of the inflammation and auto-immune reaction, healing of the intestinal wall, and correcting the microbiome. Multiple types of drugs can inhibit the inflammation and immune response, e.g. corticosteroids and TNFalpha blockers. Use of combination therapy (anti-tumour necrosis factor (TNF) a monoclonal antibodies and an immunomodulator) is one of the most effective treatments in Crohn Disease (CD) (Colombel et al. N Engl J Med 2010; 362:1383-1395 DOI: 10.1056/NEJMoa0904492; incorporated by reference) particularly when given early in the disease course (D'Haens, G. Top-down therapy for IBD: rationale and requisite evidence. Nat Rev Gastroenterol Hepatol 7, 86-92 (2010). https://doi.org/10.1038/nrgastro.2009.222; D'Haens et al. 2008 VOLUME 371, ISSUE 9613, P660-667, Feb. 23, 2008 DOI:https://doi.org/10.1016/S0140-6736(08)60304-9, each hereby incorporated by reference), but indiscriminate use of this strategy would be very expensive and expose many patients to side effects of drugs that they do not require. Unfortunately, in IBD, as in most autoimmune and inflammatory diseases, biomarkers that can reliably predict response or resistance to anti-TNFalpha drugs, and to measure the extent of the actual response, as well as emerging drug resistance during treatment are not available, precluding the delivery of personalized therapy.

[0004] Therefore novel ways of predicting treatment response and effectiveness of treatment with anti-TNFalpha compounds are desired.

### SUMMARY OF THE INVENTION

[0005] In in a first aspect the invention relates to a method for predicting the treatment response of a subject suffering from inflammatory bowel disease (IBD) to treatment with an anti-TNFalpha compound based on on inferred cellular signaling pathway activity or activities in a sample obtained from the subject, the method comprising: comparing the inferred cellular signaling pathway activity, or when multiple cellular signaling pathway activities are used the combined cellular signaling pathway activities, with a threshold value;
[0006] wherein the cellular signaling pathway is one or more cellular signaling pathway selected from TGFbeta, NFkB, MAPK-AP1, STAT3 and WNT, preferably wherein the cellular signaling pathway is one or more cellular signaling pathway selected from TGFbeta and NFkB;
[0007] wherein the cellular signaling pathway activity or activities are inferred by
[0008] determining an activity level of a transcription factor (TF) element of the respective cellular signaling pathway in the sample obtained from the subject, the TF element controlling transcription of three or more target genes of the respective cellular signaling pathway, the determining being based on evaluating a calibrated mathematical pathway model relating the expression levels of the three or more target genes of the respective cellular signaling pathway to the activity level of the TF element of the cellular signaling pathway, and
[0009] inferring the activity of the cellular signaling pathway in the subject based on the determined activity level of the TF element of the respective cellular signaling pathway in the sample of the subject;
[0010] wherein the treatment response is predicted to be favorable when the inferred cellular signaling pathway activity or the combined cellular signaling pathway activities are below the threshold value, and wherein the treatment response is predicted to be unfavorable when the inferred cellular signaling pathway activity or the combined cellular signaling pathway activities are above the threshold value, wherein:
[0011] the three or more target genes of the TGFbeta cellular signaling pathway are selected from ANGPTL4, CDC42EP3, CDKNIA, CDKN2B, CTGF, GADD45A, GADD45B, HMGA2, ID1, IL11, SERPINE1, INPP5D, JUNB, MMP2, MMP9, NKX2-5, OVOL1, PDGFB, PTHLH, SGK1, SKIL, SMAD4, SMAD5, SMAD6, SMAD7, SNAI1, SNAI2, TIMP1, and VEGFA;
[0012] the three or more target genes of the NFkB cellular signaling pathway are selected from BCL2L1, BIRC3, CCL2, CCL3, CCL4, CCL5, CCL20, CCL22, CX3CL1, CXCL1, CXCL2, CXCL3, ICAM1, IL1B, IL6, IL8, IRF1, MMP9, NFKB2, NFKBIA, NFKB IE, PTGS2, SELE, STAT5A, TNF, TNFAIP2, TNIP1, TRAF1, and VCAM1;
[0013] the three or more target genes of the MAPK-AP1 cellular signaling pathway are selected from BCL2L11, CCND1, DDIT3, DNMT1, EGFR, ENPP2, EZR, FASLG, FIGF, GLRX, IL2, IVL, LOR, MMP1, MMP3, MMP9, SERPINE1, PLAU, PLAUR, PTGS2, SNCG, TIMP1, TP53, and VIM;
[0014] the three or more target genes of the STAT3 cellular signaling pathway are selected from AKT1, BCL2, BCL2L1, BIRC5, CCND1, CD274, CDKN1A, CRP, FGF2, FOS, FSCN1, FSCN2, FSCN3, HIF1A, HSP90AA1, HSP90AB1, HSP90B1, HSPA1A, HSPA1B, ICAM1, IFNG, IL10, JUNB, MCL1, MMP1, MMP3, MMP9, MUC1, MYC, NOS2, POU2F1, PTGS2, SAA1, STAT1, TIMP1, TNFRSF1B, TWIST1, VIM, and ZEB1;
[0015] the three or more target genes of the WNT cellular signaling pathway are selected from KIAA1199, AXIN2, RNF43, TBX3, TDGF1, SOX9, ASCL2, IL8, SP5, ZNRF3, KLF6, CCND1, DEFA6 and FZD7.

[0016] In a second aspect, the invention relates to a
[0017] method for determining
[0018] the effectiveness of a treatment of a subject suffering from IBD with an anti-TNFalpha compound based on inferred cellular signaling pathway activity or activities in a sample obtained from the subject, the method comprising:
[0019] comparing the inferred cellular signaling pathway activity, or when multiple cellular signaling pathway activities are used the combined cellular signaling pathway activities, with a threshold value;
[0020] wherein if the IBD is UC, the cellular signaling pathway is AR and/or MAPK-AP1,
[0021] wherein if the IBD is CD, the cellular signaling pathway is MAPK-AP1 and/or NFkB,
[0022] wherein the cellular signaling pathway activity or activities are inferred by
[0023] determining an activity level of a transcription factor (TF) element of the respective cellular signaling pathway in the sample obtained from the subject, the TF element controlling transcription of three or more target genes of the respective cellular signaling pathway, the determining being based on evaluating a calibrated mathematical pathway model relating the expression levels of the three or more target genes of the respective cellular signaling pathway to the activity level of the TF element of the cellular signaling pathway, and
[0024] inferring the activity of the cellular signaling pathway in the subject based on the determined activity level of the TF element of the respective cellular signaling pathway in the sample of the subject;
[0025] wherein the treatment is considered to be successful when the inferred cellular signaling pathway activity or the combined cellular signaling pathway activities are below the threshold value, and wherein the treatment is considered to be unsuccessful when the inferred cellular signaling pathway activity or the combined cellular signaling pathway activities are above the threshold value, wherein:
[0026] the three or more target genes of the AR cellular signaling pathway are selected from KLK2, PMEPA1, TMPRSS2, NKX3-1, ABCC4, KLK3, FKBP5, ELL2, UGT2B15, DHCR24, PPAP2A, NDRG1, LRIG1, CREB3L4, LCP1, GUCY1A3, AR and EAF2;
[0027] the three or more target genes of the MAPK-AP1 cellular signaling pathway are selected from BCL2L11, CCND1, DDIT3, DNMT1, EGFR, ENPP2, EZR, FASLG, FIGF, GLRX, IL2, IVL, LOR, MMP1, MMP3, MMP9, SERPINE1, PLAU, PLAUR, PTGS2, SNCG, TIMP1, TP53, and VIM;
[0028] the three or more target genes of the NFkB cellular signaling pathway are selected from BCL2L1, BIRC3, CCL2, CCL3, CCL4, CCL5, CCL20, CCL22, CX3CL1, CXCL1, CXCL2, CXCL3, ICAM1, IL1B, IL6, IL8, IRF1, MMP9, NFKB2, NFKBIA, NFKB IE, PTGS2, SELE, STAT5A, TNF, TNFAIP2, TNIP1, TRAF1, and VCAM1.

[0029] In a third aspect, the invention relates to an anti-TNFalpha compound for use of in the treatment of IBD in a subject, wherein the use comprises:
[0030] performing the method as defined in the first or the second aspect of the invention to determine the treatment response of the subject to anti-TNFalpha treatment, and
[0031] administering the anti-TNFalpha compound of the treatment response to anti-TNFalpha treatment is found to be favorable for the subject.

[0032] In a fourth aspect, the invention relates to a kit of parts comprising primers and probes for the detection of the expression levels of three or more target genes, wherein the expression levels of the three or more genes are selected from:
[0033] the group consisting of ANGPTL4, CDC42EP3, CDKNIA, CDKN2B, CTGF, GADD45A, GADD45B, HMGA2, ID1, IL11, SERPINE1, INPP5D, JUNB, MMP2, MMP9, NKX2-5, OVOL1, PDGFB, PTHLH, SGK1, SKIL, SMAD4, SMAD5, SMAD6, SMAD7, SNAI1, SNAI2, TIMP1, and VEGFA; and/or
[0034] the group consisting of BCL2L1, BIRC3, CCL2, CCL3, CCL4, CCL5, CCL20, CCL22, CX3CL1, CXCL1, CXCL2, CXCL3, ICAM1, IL1B, IL6, IL8, IRF1, MMP9, NFKB2, NFKBIA, NFKB IE, PTGS2, SELE, STAT5A, TNF, TNFAIP2, TNIP1, TRAF1, and VCAM1; and/or
[0035] the group consisting of MAPK-AP1 cellular signaling pathway are selected from BCL2L11, CCND1, DDIT3, DNMT1, EGFR, ENPP2, EZR, FASLG, FIGF, GLRX, IL2, IVL, LOR, MMP1, MMP3, MMP9, SERPINE1, PLAU, PLAUR, PTGS2, SNCG, TIMP1, TP53, and VIM; and/or
[0036] the group consisting of AKT1, BCL2, BCL2L1, BIRC5, CCND1, CD274, CDKN1A, CRP, FGF2, FOS, FSCN1, FSCN2, FSCN3, HIF1A, HSP90AA1, HSP90AB1, HSP90B1, HSPA1A, HSPA1B, ICAM1, IFNG, IL10, JUNB, MCL1, MMP1, MMP3, MMP9, MUC1, MYC, NOS2, POU2F1, PTGS2, SAA1, STAT1, TIMP1, TNFRSF1B, TWIST1, VIM, and ZEB1; and/or
[0037] t the group consisting of KIAA1199, AXIN2, RNF43, TBX3, TDGF1, SOX9, ASCL2, IL8, SP5, ZNRF3, KLF6, CCND1, DEFA6 and FZD7.

[0038] In a fifth aspect the invention relates to a use of the kit according to the fourth aspect of the invention in the method according to the first or the second aspect of the invention.

### DETAILED DESCRIPTION OF THE INVENTION

[0039] Currently available treatment decisions are based on the disease diagnosis from histopathology with other diagnostic measurements. It was found that using pathway activity models diagnosis can be linked to a pathophysiological disease mechanism, in terms of a specific combined signaling pathway activity profile, and this can be used to predict treatment response, treatment effectiveness and treatment monitoring. The inventors used pathway analysis of public datasets to determine which cellular signaling pathways can be used to predict whether a patient suffering from IBD will have a good treatment response to treatment with an anti-TNFalpha compound, to determine the effectiveness in patients being treated with an anti-TNFalpha compound. It was found that there is a significant elevation in the TGFbeta, NFkB, MAPK-AP1, STAT3 and WNT pathways in biopsies from IBD patients, pre-treatment, that have poor response to anti-TNFalpha treatment as compared to IBD patients that respond well to anti-TNFalpha treatment. These results hold both for Ulcerative Colitis and Crohn's Disease. Further is was found that treatment effectiveness can be determined for Ulcerative Colitis and Crohn's Disease patients undergoing anti-TNFalpha treatment based on the AR and/or the MAPK-AP1 cellular signaling in the case of Ulcerative Colitis, or based on the MAPK-AP1 and/or the NFkB cellular signaling pathway in case of Crohn's Disease.

[0040] The inventors investigated further whether the target genes that form the basis of these cellular signaling pathway activity models can be used instead of the pathway models. To this extend, it was determined for each pathway which target genes provided the biggest contribution to the cellular signaling pathway activity score in the publicly available datasets used here. For each application, a selection of the cellular signaling pathway target genes was made that most contributed to the pathway activity score in that respective application. It was then tested whether random selections of target gene expression levels allow for distinguishing between different situations (e.g. responders and non-responders in pre-treatment biopsies) in a significant manner. It was found that a random selection of three target genes selected as described above allow for significant stratification in most cases. Depending on the application and strictness of target gene selection, between approximately 90 to 100 percent of the random selections of three target genes allows for a significant distinction between the different groups (e.g. responders and non-responders, or effective treatment vs non-effective treatment).

[0041] Therefore, in a first aspect the invention relates to a method for predicting the treatment response of a subject suffering from inflammatory bowel disease (IBD) to treatment with an anti-TNFalpha compound based on the expression levels of three or more, e.g. three, four, five, six seven, eight, nine, ten, eleven or twelve or more, genes, wherein the expression levels of the three or more, e.g. three, four, five, six seven, eight, nine, ten, eleven or twelve or more, genes are selected from the group consisting of:
[0042] ANGPTL4, BCL2L1, BCL2L11, BIRC3, CCL2, CCL22, CCL3, CCL4, CCL5, CCND1, CD274, CD44, CDKN2B, COL18A1, CTGF, CX3CL1, CXCL1, CXCL2, CXCL3, DKK1, DNMT1, ENPP2, FGF2, FOS, FSCN1, GADD45B, GLRX, HIF1A, HMGA2, HNF1A, HSP90AB1, HSP90B1, ICAM1, IFNG, IL11, IL10, IL1B, IL6, IL8, IRF1, INPP5D, JUNB, KIAA1199, LEF1, MCL1, MMP1, MMP2, MMP3, MMP9, MYC, NFKB2, NFKBIA, NFKBIE, NOS2, OVOL1, PDGFB, PLAU, PLAUR, PTGS2, PTHLH, SAA1, SELE, SERPINE1, SKIL, SMAD4, SNAI2, STAT1, STAT5A, TBX3, TCF7L2, TIMP1, TNF, TNFAIP2, TNFRSF1B, TRAF1, TWIST1, VCAM1, VEGFA, VIM, and ZEB1, and
[0043] wherein an increased expression level of CDKN2B, HMGA2, OVOL1, SMAD4, BCL2L11, HNF1A or TCF7L2, or a decreased expression level of any of the other genes corresponds to a favorable treatment response, and
[0044] wherein a decreased expression level of CDKN2B, HMGA2, OVOL1, SMAD4, BCL2L11, HNF1A or TCF7L2, or an increased expression level of any of the other genes corresponds to a not favorable treatment response.

[0045] In an embodiment the three or more expression levels are used to predict whether the treatment response to treatment of IBD in the patient with an anti-TNFalpha compound is favorable or not favorable.

[0046] In an embodiment a decreased expression level of CDKN2B, HMGA2, OVOL1, SMAD4, BCL2L11, HNF1A or TCF7L2, or an increased expression level of any of the other genes corresponds to a not favorable treatment response.

[0047] When used herein, treatment prediction refers to predicting the likelihood of an IBD patient (e.g. an UC or a CD patient) to having a treatment response as defined herein below to treatment with an anti-TNFalpha compound, wherein said treatment prediction is made prior to treatment, for example based on a biopsy or sample from the patient.

[0048] When used herein, treatment effectiveness refers to predicting the likelihood of an IBD patient (e.g. an UC or a CD patient) to having a treatment response as defined herein below to treatment with an anti-TNFalpha compound, wherein said treatment prediction is made after onset of said treatment, for example based on a biopsy or sample from the patient.

[0049] It was found that the expression levels of the following genes strongly correlate with pathway activity in the investigated public datasets: ANGPTL4, BCL2L1, BCL2L11, BIRC3, CCL2, CCL22, CCL3, CCL4, CCL5, CCND1, CD274, CD44, CDKN2B, COL18A1, CTGF, CX3CL1, CXCL1, CXCL2, CXCL3, DKK1, DNMT1, ENPP2, FGF2, FOS, FSCN1, GADD45B, GLRX, HIF1A, HMGA2, HNF1A, HSP90AB1, HSP90B1, ICAM1, IFNG, IL11, IL10, IL1B, IL6, IL8, IRF1, INPP5D, JUNB, KIAA1199, LEF1, MCL1, MMP1, MMP2, MMP3, MMP9, MYC, NFKB2, NFKBIA, NFKBIE, NOS2, OVOL1, PDGFB, PLAU, PLAUR, PTGS2, PTHLH, SAA1, SELE, SERPINE1, SKIL, SMAD4, SNAI2, STAT1, STAT5A, TBX3, TCF7L2, TIMP1, TNF, TNFAIP2, TNFRSF1B, TRAF1, TWIST1, VCAM1, VEGFA, VIM, and ZEB1,

[0050] Of this set of genes, the expression levels of CDKN2B, HMGA2, OVOL1, SMAD4, BCL2L11, HNF1A or TCF7L2 demonstrate a negative correlation with pathway activity, meaning their expression levels are reduced with increased pathway activity. Therefore when adding up expression levels of multiple target gene the expression levels of the genes CDKN2B, HMGA2, OVOL1, SMAD4, BCL2L11, HNF1A or TCF7L2 are preferably modified with a negative constant, preferably with “−1”.

[0051] The expression levels of ANGPTL4, BCL2L1, BIRC3, CCL2, CCL22, CCL3, CCL4, CCL5, CCND1, CD274, CD44, COL18A1, CTGF, CX3CL1, CXCL1, CXCL2, CXCL3, DKK1, DNMT1, ENPP2, FGF2, FOS, FSCN1, GADD45B, GLRX, HIF1A, HSP90AB1, HSP90B1, ICAM1, IFNG, IL11, IL10, IL1B, IL6, IL8, IRF1, INPP5D, JUNB, KIAA1199, LEF1, MCL1, MMP1, MMP2, MMP3, MMP9, MYC, NFKB2, NFKBIA, NFKBIE, NOS2, PDGFB, PLAU, PLAUR, PTGS2, PTHLH, SAA1, SELE, SERPINE1, SKIL, SNAI2, STAT1, STAT5A, TBX3, TIMP1, TNF, TNFAIP2, TNFRSF1B, TRAF1, TWIST1, VCAM1, VEGFA, VIM, and ZEB1 demonstrate a positive correlation with pathway activity, meaning their expression levels are increased with increased pathway activity.

[0052] As can be deducted from the data presented herein, by using more target genes the accuracy of the prediction can be increased, as is evident from the comparison of three gene pathway models vs full pathway models, and the data comparing statistical accuracy of a prediction based on a random selection of three vs six genes. Therefore it may be desirable to increase the number of target gene expression levels that are used in the prediction, however it is emphasized that as demonstrated here a selection of three target genes suffices to make accurate predictions.

[0053] In an embodiment the IBD is Ulcerative Colitis (UC) or Crohn Disease (CD). It was found that these genes were predictive for treatment response both UC and CD patients.

[0054] Using a random selection of three genes from the groups listed above a significant distinction can be made between responders and non-responders to anti-TNFalpha treatment in a pre-treatment biopsy in both Ulcerative Colitis and Crohn's Disease patients, as evidenced by FIGS. 5 to 20.

[0055] Currently no real methods are available to predict successful outcome of anti-TNFalpha treatment in Inflammatory Bowel Disease patients [Lopetuso, Loris Riccardo et al. “Can We Predict the Efficacy of Anti-TNF-α Agents?.” International journal of molecular sciences vol. 18, 9 1973. 14 Sep. 2017, doi:10.3390/ijms18091973; incorporated by reference in its entirety]. Literature data report that primary non-response to anti-TNF-α induction therapy (assessed not before weeks 8-12 after starting treatment) occurs between 20-40% of patients in clinical trials and in 10-20% in “real life” series. Secondary loss of response (LOR) is also a common clinical problem with incidence ranging between 23 and 46% at 12 months after anti-TNF-α initiation [Ben-Horin S., Kopylov U., Chowers Y. Optimizing anti-TNF treatments in inflammatory bowel disease. Autoimmun. Rev. 2014; 13:24-30. doi: 10.1016/j.autrev.2013.06.002.]. The use of biological therapies, in particular anti-tumor necrosis factor (TNF)-α agents, has spread increasingly in the last two decades thanks to their potential and unique ability of altering the natural history of IBD. In fact, both controlled trials and “real life” studies showed that anti-TNF-α agents, including infliximab (IFX), adalimumab (ADA), golimumab (GOL) and certolizumab pegol (CER), are able to induce and maintain clinical remission and to reduce the need for surgery and hospitalization. Furthermore, they lead to an improvement in quality of life and also to a reduction in direct and indirect costs associated with these chronic debilitating disorders.

[0056] Unfortunately, anti-TNF-α agents are not a magic bullet for all IBD cases. Firstly, side-effects can be severe and life-threatening in some patients, mainly due to infective events and then to immunogenicity, with the formation of antibodies-to-anti-TNF-α and a consequent loss of response (LOR) to these drugs over time. Therefore, there is a great need for accurate prediction methods to anti-TNFalpha therapies in IBD patients. The methods disclosed herein provide an accurate method for predicting treatment response in IBD patients to anti-TNFalpha therapy based on a biopsy, as evidenced by the Experimental results below. The method is based on the expression levels of a carefully curated set of genes which are found to be predictive.

[0057] To identify cellular signaling pathways that could be predictive in pre-treatment biopsies, pathway activities were analyzed on public datasets (GSE12251, GSE16879, GSE23597 and GSE52746). It was found that, individually, each of the TGFbeta, NFkB, MAPK-AP1, STAT3 and WNT cellular signaling pathways could be used to predict if a patient would responds to treatment with an anti-TNFalpha compound, by comparing the cellular signaling pathway activities of responders and non-responders in pre-treatment biopsies. Pathway activities for each of the TGFbeta, NFkB, MAPK-AP1, STAT3 and WNT cellular signaling pathways were significantly higher in pre-treatment biopsies from subjects that do not respond to treatment with an anti-TNFalpha compound compared to subjects that respond well to treatment with an anti-TNFalpha compound. Therefore as part of the invention disclosed herein, the invention relates to a method for predicting the treatment response of a subject suffering from inflammatory bowel disease (IBD) to treatment with an anti-TNFalpha compound based on inferred cellular signaling pathway activity or activities in a sample obtained from the subject, the method comprising comparing the inferred cellular signaling pathway activity, or when multiple cellular signaling pathway activities are used the combined cellular signaling pathway activities, with a threshold value, wherein the cellular signaling pathway is one or more cellular signaling pathway selected from TGFbeta, NFkB, MAPK-AP1, STAT3 and WNT, as detailed herein below. The target genes used for determining cellular signaling pathway activity using these pathway models are preferably selected as follows:
[0058] genes of the TGFbeta pathway are selected from the group consisting of ANGPTL4, CDC42EP3, CDKNIA, CDKN2B, CTGF, GADD45A, GADD45B, HMGA2, ID1, IL11, SERPINE1, INPP5D, JUNB, MMP2, MMP9, NKX2-5, OVOL1, PDGFB, PTHLH, SGK1, SKIL, SMAD4, SMAD5, SMAD6, SMAD7, SNAI1, SNAI2, TIMP1, and VEGFA, preferably, from the group consisting of: ANGPTL4, CDC42EP3, CDKNIA, CTGF, GADD45A, GADD45B, HMGA2, ID1, IL11, JUNB, PDGFB, PTHLH, SERPINE1, SGK1, SKIL, SMAD4, SMAD5, SMAD6, SMAD7, SNAI2, VEGFA, more preferably, from the group consisting of: ANGPTL4, CDC42EP3, CDKNIA, CTGF, GADD45B, ID1, IL11, JUNB, SERPINE1, PDGFB, SKIL, SMAD7, SNAI2, and VEGFA, more preferably, from the group consisting of: ANGPTL4, CDC42EP3, ID1, IL11, JUNB, SERPINE1, SKIL, and SMAD7;
[0059] genes of the NFkB pathway are selected from the group consisting of BCL2L1, BIRC3, CCL2, CCL3, CCL4, CCL5, CCL20, CCL22, CX3CL1, CXCL1, CXCL2, CXCL3, ICAM1, IL1B, IL6, IL8, IRF1, MMP9, NFKB2, NFKBIA, NFKB IE, PTGS2, SELE, STAT5A, TNF, TNFAIP2, TNIP1, TRAF1, and VCAM1;
[0060] genes of the MAPK-AP1 pathway are selected from the group consisting of BCL2L11, CCND1, DDIT3, DNMT1, EGFR, ENPP2, EZR, FASLG, FIGF, GLRX, IL2, IVL, LOR, MMP1, MMP3, MMP9, SERPINE1, PLAU, PLAUR, PTGS2, SNCG, TIMP1, TP53, and VIM, preferably, from the group consisting of: CCND1, EGFR, EZR, GLRX, MMP1, MMP3, PLAU, PLAUR, SERPINE1, SNCG, and TIMP1;
[0061] genes of the STAT3 pathway are selected from the group consisting of AKT1, BCL2, BCL2L1, BIRC5, CCND1, CD274, CDKN1A, CRP, FGF2, FOS, FSCN1, FSCN2, FSCN3, HIF1A, HSP90AA1, HSP90AB1, HSP90B1, HSPA1A, HSPA1B, ICAM1, IFNG, IL10, JUNB, MCL1, MMP1, MMP3, MMP9, MUC1, MYC, NOS2, POU2F1, PTGS2, SAA1, STAT1, TIMP1, TNFRSF1B, TWIST1, VIM, and ZEB1, preferably, either from the group consisting of: BCL2L1, BIRC5, CCND1, CD274, FOS, HIF1A, HSP90AA1, HSP90AB1, MMP1, and MYC, or from the group consisting of: BCL2L1, CD274, FOS, HSP90B1, HSPA1B, ICAM1, IFNG, JUNB, PTGS2, STAT1, TNFRSF1B, and ZEB1;
[0062] genes of the WNT pathway are selected from the group consisting of KIAA1199, AXIN2, R F43, TBX3, TDGF1, SOX9, ASCL2, IL8, SP5, Z RF3, KLF6, CCND1, DEFA6 and FZD7, optionally further comprising one or more target genes selected from NKD1, OAT, FAT1, LEF1, GLUL, REG1B, TCF7L2, COL18A1, BMP7, SLC1A2, ADRA2C, PPARG, DKK1, HNF1A and LECT2.

[0063] Next the inventors reviewed whether a specific subset of target genes in the pathway models is responsible for the pathway activity. The pathway models are constructed with a large set of genes keeping in mind that they are broadly applicable, therefore not every gene will be upregulated in a specific context (e.g. cell or tissue type, or specific biological function), although it is found that in most cases a randomly selected subset of three genes should be predictive of pathway activity in any application. For the specific application, predicting response to anti-TNFalpha treatment based on a pre-treatment biopsy of a subject suffering from IBD can be based on a random selection of three genes. Therefore target genes that contribute less to the total pathway activity were identified and removed from the list, resulting in a cured list of target genes. The curation of the target genes list was performed based on total cellular signaling pathway activity regardless of group (responder vs non-responder) as to not introduce any bias. The curated target genes lists are:
[0064] group 1 (curated TGFbeta list) consist of the genes: ANGPTL4, CDKN2B, CTGF, GADD45B, HMGA2, IL11, INPP5D, JUNB, MMP2, MMP9, OVOL1, PDGFB, PTHLH, SERPINE1, SKIL, SMAD4, SNAI2, TIMP1, VEGFA
[0065] group 2 (curated NFkB list) consist of the genes: BCL2L1, BIRC3, CCL2, CCL22, CCL3, CCL4, CCL5, CX3CL1, CXCL1, CXCL2, CXCL3, ICAM1, IL1B, IL6, IL8, IRF1, MMP9, NFKB2, NFKBIA, NFKBIE, PTGS2, SELE, STAT5A, TNF, TNFAIP2, TRAF1, VCAM1;
[0066] group 3 (curated MAPK-AP1 list) consist of the genes: BCL2L11, CCND1, DNMT1, ENPP2, GLRX, MMP1, MMP3, MMP9, PLAU, PLAUR, PTGS2, SERPINE1, TIMP1, VIM;
[0067] group 4(curated STAT3 list) consist of the genes: BCL2L1, CCND1, CD274, FGF2, FOS, FSCN1, HIF1A, HSP90AB1, HSP90B1, ICAM1, IFNG, IL10, JUNB, MCL1, MMP1, MMP3, MMP9, MYC, NOS2, PTGS2, SAA1, STAT1, TIMP1, TNFRSF1B, TWIST1, VIM, ZEB1;
[0068] group 5 (curated WNT list) consist of the genes: CCND1, CD44, COL18A1, DKK1, HNF1A, IL8, KIAA1199, LEF1, MYC, TBX3, TCF7L2.

[0069] Therefore in an embodiment, the invention relates to a method for predicting the treatment response of a subject suffering from inflammatory bowel disease (IBD) to treatment with an anti-TNFalpha compound based on the expression levels of three or more genes, wherein the expression levels of the three or more genes are selected from one or more groups selected from group 1, group 2, group 3, group 4, and group 5; and wherein group 1 consist of the genes: ANGPTL4, CDKN2B, CTGF, GADD45B, HMGA2, IL11, INPP5D, JUNB, MMP2, MMP9, OVOL1, PDGFB, PTHLH, SERPINE1, SKIL, SMAD4, SNAI2, TIMP1, VEGFA; wherein group 2 consist of the genes: BCL2L1, BIRC3, CCL2, CCL22, CCL3, CCL4, CCL5, CX3CL1, CXCL1, CXCL2, CXCL3, ICAM1, IL1B, IL6, IL8, IRF1, MMP9, NFKB2, NFKBIA, NFKBIE, PTGS2, SELE, STAT5A, TNF, TNFAIP2, TRAF1, VCAM1; wherein group 3 consist of the genes: BCL2L11, CCND1, DNMT1, ENPP2, GLRX, MMP1, MMP3, MMP9, PLAU, PLAUR, PTGS2, SERPINE1, TIMP1, VIM; wherein group 4 consist of the genes: BCL2L1, CCND1, CD274, FGF2, FOS, FSCN1, HIF1A, HSP90AB1, HSP90B1, ICAM1, IFNG, IL10, JUNB, MCL1, MMP1, MMP3, MMP9, MYC, NOS2, PTGS2, SAA1, STAT1, TIMP1, TNFRSF1B, TWIST1, VIM, ZEB1; wherein group 5 consist of the genes: CCND1, CD44, COL18A1, DKK1, HNF1A, IL8, KIAA1 199, LEF1, MYC, TBX3, TCF7L2; and wherein the three or more expression levels are used to predict whether the treatment response to treatment of IBD in the patient with an anti-TNFalpha compound is favorable or not favorable, wherein a decreased expression level of CDKN2B, HMGA2, OVOL1, SMAD4, BCL2L11, HNF1A or TCF7L2, or an increased expression level of any of the other genes corresponds to a not favorable treatment response, and wherein an increased expression level of CDKN2B, HMGA2, OVOL1, SMAD4, BCL2L11, HNF1A or TCF7L2, or a decreased expression level of any of the other genes corresponds to a favorable treatment response. Preferably, wherein: group 1 consist of the genes: ANGPTL4, CDKN2B, CTGF, GADD45B, IL11, INPP5D, JUNB, MMP2, MMP9, PTHLH, SERPINE1, SNAI2, TIMP1; group 2 consist of the genes: BCL2L1, BIRC3, CCL2, CCL22, CCL3, CCL4, CCL5, CX3CL1, CXCL1, CXCL2, CXCL3, ICAM1, IL1B, IL6, IL8, IRF1, MMP9, NFKB2, NFKBIA, NFKBIE, PTGS2, SELE, STAT5A, TNF, TNFAIP2, TRAF1, VCAM1; wherein group 3 consist of the genes: CCND1, GLRX, MMP1, MMP3, MMP9, PLAU, PLAUR, PTGS2, SERPINE1, TIMP1, VIM; wherein group 4 consist of the genes: BCL2L1, CCND1, CD274, FGF2, FSCN1, HIF1A, HSP90B1, ICAM1, IFNG, JUNB, MCL1, MMP1, MMP3, MMP9, PTGS2, STAT1, TIMP1, TNFRSF1B, TWIST1, VIM, ZEB1; wherein group 5 consist of the genes: CCND1, CD44, COL18A1, DKK1, IL8, KIAA1199, TBX3. The three or more genes may be selected from a single group or may be a combination of different groups. As the strongest correlation was found between the NFkB and TGFbeta cellular signaling pathway activities and treatment response prediction, preferably the three or more genes are chosen form group 1 and/or group 2.

[0070] Next all the curated pathway target genes were pooled, and the inventors analyzed if random selections of three genes of the pooled curated target genes would still allow a prediction for treatment response. In order to analyze this, a random selection of three genes was made 1000 times, and a simple linear classifier was made with those 1000 random selections of three genes by assigning each gene a weight+1 or −1 depending on the sign of their correlation (up- or down regulated when pathway activity is increased). Next the linear classifier was applied on the samples from the two sample groups to be distinguished, and a Wilcox Rank Sum test was performed, resulting in a p-value. These p-values are plotted in FIGS. 38 to 45. As can be seen, at least 90% percent of the random selections of three genes of the pooled curated target genes has statistically relevant combined expression levels between responders and non-responders (p value of 0.05 or lower).

[0071] As expected, by selecting more curated target genes for the prediction, the likelihood that a random selection of curated target genes allow for statistically significant prediction is increased (see FIGS. 40, 41, 44 and 45). Therefore, in an embodiment, the method is preferably based on three or more, for example three, four, five, six, seven eight, nine, ten, eleven or twelve or more, genes selected from the group consisting of ANGPTL4, BCL2L1, BCL2L11, BIRC3, CCL2, CCL22, CCL3, CCL4, CCL5, CCND1, CD274, CD44, CDKN2B, COL18A1, CTGF, CX3CL1, CXCL1, CXCL2, CXCL3, DKK1, DNMT1, ENPP2, FGF2, FOS, FSCN1, GADD45B, GLRX, HIF1A, HMGA2, HNF1A, HSP90AB1, HSP90B1, ICAM1, IFNG, IL11, IL10, IL1B, IL6, IL8, IRF1, INPP5D, JUNB, KIAA1199, LEF1, MCL1, MMP1, MMP2, MMP3, MMP9, MYC, NFKB2, NFKBIA, NFKBIE, NOS2, OVOL1, PDGFB, PLAU, PLAUR, PTGS2, PTHLH, SAA1, SELE, SERPINE1, SKIL, SMAD4, SNAI2, STAT1, STAT5A, TBX3, TCF7L2, TIMP1, TNF, TNFAIP2, TNFRSF1B, TRAF1, TWIST1, VCAM1, VEGFA, VIM, and ZEB1.

[0072] As further indicated in FIGS. 42 to 45, by further increasing the threshold of accepting target genes for the curated gene list, the chance that three randomly selected genes are statistically significant for predicting treatment response is even further increased, therefore in a further preferred embodiment the three or more, for example three, four, five, six, seven eight, nine, ten, eleven or twelve or more, genes selected from the group consisting of ANGPTL4, BCL2L1, BIRC3, CCL2, CCL22, CCL3, CCL4, CCL5, CCND1, CD274, CD44, CDKN2B, COL18A1, CTGF, CX3CL1, CXCL1, CXCL2, CXCL3, DKK1, FGF2, FSCN1, GADD45B, GLRX, HIF1A, HSP90B1, ICAM1, IFNG, IL11, IL1B, IL6, IL8, INPP5D, IRF1, JUNB, KIAA1199, MCL1, MMP1, MMP2, MMP3, MMP9, NFKB2, NFKBIA, NFKBIE, PLAU, PLAUR, PTGS2, PTHLH, SELE, SERPINE1, SNAI2, STAT1, STAT5A, TBX3, TIMP1, TNF, TNFAIP2, TNFRSF1B, TRAF1, TWIST1, VCAM1, VIM, ZEB1.

[0073] As can be further derived from among others FIGS. 7, 11, 15 and 19, the TGFbeta and the NFkB have the strongest correlation with predicting anti-TNFalpha treatment effectiveness based on pre-treatment biopsy, therefore the prediction is preferably based on a selection of the curated TGFbeta or NFkB cellular signaling pathway target genes:
[0074] group 1 (curated TGFbeta list) consist of the genes: ANGPTL4, CDKN2B, CTGF, GADD45B, HMGA2, IL11, INPP5D, JUNB, MMP2, MMP9, OVOL1, PDGFB, PTHLH, SERPINE1, SKIL, SMAD4, SNAI2, TIMP1, VEGFA
[0075] group 2 (curated NFkB list) consist of the genes: BCL2L1, BIRC3, CCL2, CCL22, CCL3, CCL4, CCL5, CX3CL1, CXCL1, CXCL2, CXCL3, ICAM1, IL1B, IL6, IL8, IRF1, MMP9, NFKB2, NFKBIA, NFKBIE, PTGS2, SELE, STAT5A, TNF, TNFAIP2, TRAF1, VCAM1; Therefore in an embodiment, the method is preferably based on three or more, for example three, four, five, six, seven eight, nine, ten, eleven or twelve or more, gene selected from the group consisting of, ANGPTL4, BCL2L1, BIRC3, CCL2, CCL22, CCL3, CCL4, CCL5, CDKN2B, CTGF, CX3CL1, CXCL1, CXCL2, CXCL3, GADD45B, HMGA2, ICAM1, IL11, IL1B, IL6, IL8, INPP5D, IRF1, JUNB, MMP2, MMP9, NFKB2, NFKBIA, NFKBIE, OVOL1, PDGFB, PTGS2, PTHLH, SELE, SERPINE1, SKIL, SMAD4, SNAI2, STAT5A, TIMP1, TNF, TNFAIP2, TRAF1, VEGFA and VCAM1, more preferably the method is based on three or more, for example three, four, five, six, seven eight, nine, ten, eleven or twelve or more, gene selected from the group consisting of ANGPTL4, BCL2L1, BIRC3, CCL2, CCL22, CCL3, CCL4, CCL5, CDKN2B, CTGF, CX3CL1, CXCL1, CXCL2, CXCL3, GADD45B, ICAM1, IL11, IL1B, IL6, IL8, INPP5D, IRF1, JUNB, MMP2, MMP9, NFKB2, NFKBIA, NFKBIE, PTGS2, PTHLH, SELE, SERPINE1, SNAI2, STAT5A, TIMP1, TNF, TNFAIP2, TRAF1 and VCAM1.

[0076] The conditions for selecting target genes (T value) and number of genes (N values) were further varied to evaluate the conditions that allow for accurate prediction of treatment or treatment effectiveness. These results are set out in Table 15 below. For each condition resulting in 90% or more of the 1000 random selections of N genes having a significant differentiation between responders and non-responders, the representative gene set are listed below in LIST A. Table 15 lists for each UC and CD patient samples (based on dataset GSE16879) prediction (treatment prediction) prediction2 (treatment prediction but only target genes from the NFkB or the TGFbeta pathway are selected) or effectiveness (treatment effectiveness) for T=0.3, 0.4 and 0.5 and N=1, 2, 3 or 6. For each condition, N genes were randomly selected 1000 times and it was reviewed how often the random selection of N genes were statistically significant in distinguishing responders and non-responders to anti-TNFalpha treatment. The results are plotted in Table 15, avgp refers to Average P value (of the 1000 random selections of N genes) and sigper refers to the percentage of the 1000 selections that are significant (P lower or equal to 0.05). For each condition that has at least 90 percent significant (meaning at least 900 out of the 1000 random selections of N genes) the corresponding gene sets are listed in list A.

[0077] Therefore, in an embodiment, the method is preferably based on N or more, for example one, two, three, four, five, six, seven eight, nine, ten, eleven or twelve or more, genes selected from a group as listed in LIST A below wherein the application is listed as prediction or prediction2 and N is indicated in LIST A for the respective set, and
[0078] wherein an increased expression level of CDKN2B, HMGA2, OVOL1, SMAD4, BCL2L11, HNF1A or TCF7L2, or a decreased expression level of any of the other genes corresponds to a favorable treatment response, and
[0079] wherein a decreased expression level of CDKN2B, HMGA2, OVOL1, SMAD4, BCL2L11, HNF1A or TCF7L2, or an increased expression level of any of the other genes corresponds to a not favorable treatment response.

[0080] Inflammatory bowel disease (IBD) is the name for a group of conditions that cause the digestive system to become inflamed (red, swollen, and sometimes painful). The most common types of IBD are ulcerative colitis and Crohn's disease. These cause similar symptoms, including diarrhea, rectal bleeding, abdominal pain, fatigue, weight loss and fever. IBD can be debilitating and sometimes leads to life-threatening complications. Crohn's disease affects the small intestine and large intestine, as well as the mouth, esophagus, stomach and the anus, whereas ulcerative colitis primarily affects the colon and the rectum.

[0081] When used herein, treatment response refers to an improvement of the grade of the disease when comparing post treatment and pre-treatment grading. Grading systems have been developed for both UC and CD. For UC this has been described in Geboes et al. (Geboes, K et al. “A reproducible grading scale for histological assessment of inflammation in ulcerative colitis.” Gut vol. 47, 3 (2000): 404-9. doi: 10.1 136/gut.47.3.404; hereby incorporated by reference in its entirety). Briefly summarized a grade can be assigned for each factor corresponding from grade 0 to 5, with the subgrade indicating the severity, ranging from 0 (no abnormality/not present) to 3 (most severe symptom) as indicated in Table 1 of Geboes et al. (hereby incorporated by reference). Grade 0 scores structural change, grade 1 chronic inflammation infiltrate, grade 2 scores lamina propria neutrophils and eosinophils, grade 3 scores neutrophils in the epithelium grade 4 scores crypt destruction and grade 5 scores erosion or ulceration. Therefore a favorable treatment response as defined herein means that when comparing grades 0-5 prior and after treatment, the subgrades are on average lower after treatment, preferably each subgrade is individually lower or equal after treatment, with the proviso that at least one subgrade is lower after treatment, indicating less severe symptoms. Equally a non-favorable treatment response as defined herein means that when comparing grades 0-5 prior and after treatment, the subgrades are on average equal or higher after treatment, for example each subgrade is individually higher or equal after treatment, indicating equal or more severe symptoms. For CD (D'Haens G R, Geboes K, Peeters M, Baert F, Penninckx F, Rutgeerts P. Early lesions of recurrent Crohn's disease caused by infusion of intestinal contents in excluded ileum. Gastroenterology. 1998 February; 114(2):262-7. doi: 10.1016/s0016-5085(98)70476-7. PMID: 9453485; hereby incorporated by reference in its entirety), briefly summarized 8 abnormalities are scored a grade 0 to 2 or 0 to 3, with a grade 0 indicating normal/not present and a higher grade indicating more severe symptoms, as indicated in Table 2 of D'Haens et al. 1998 (hereby incorporated by reference). The following abnormalities are scored: epithelial damage, architectural changes, infiltration of mononuclear cells in the lamina propria, infiltration of polymorphonuclear cell in the lamina propria, polymorphonuclear cell in the epithelium, presence of erosion and/or ulcers, presence of granuloma, and number of biopsy specimens affected. Therefore a favorable treatment response as defined herein means that when comparing the grades prior and after treatment, the grades are on average lower after treatment, preferably each grade is individually lower or equal after treatment with the proviso that at least one grade is lower, indicating less severe symptoms. Equally a non-favorable treatment response as defined herein means that when comparing the grades prior and after treatment, the grades are on average equal or higher after treatment, for example each grade is individually equal or higher after treatment, indicating equal or more severe symptoms.

[0082] When used herein, subject refers to a human or non-human animal. Preferably the subject is suffering from, diagnosed with, suspected to have, undergoing treatment for or has been cured from an inflammatory bowel disease (IBD) such as Ulcerative Colitis (UC) or Crohn's Disease (CD), unless the subject is a healthy control subject. The subject may also be referred herein as patient.

[0083] When used herein, the terms anti-TNFalpha compound or anti-TNFalpha therapy or anti-TNFalpha treatment are used interchangeably, and refer to a compound having an inhibitory effect on TNFalpha signaling, or it may refer to administration of said compound to a subject as defined herein, depending on the context. Compounds having an inhibitory effect on TNF-alpha signaling may exert their effect in the ligand (TNFalpha), e.g. by preventing the ligand to bind to its receptor. Alternatively the compounds may exert their effect directly on the receptor or downstream of the receptor by preventing the receptor or downstream signaling pathways to be activated. Compounds having an inhibitory effect on TNF-alpha signaling are known to the skilled person and may also be referred to as TNFalpha blockers or anti-TNFalpha drugs. Anti-TNFalpha compounds may for example be inhibitory antibodies, small molecule inhibitors or nucleotide based inhibitors such as RNAi, miRNA, however other inhibitors may be known to the person skilled in the art. Non limiting examples of anti-TNFalpha compounds are antibody based compounds such as Adalimumab, Certolizumab, Etanercept, Golimumab, Infliximab, or a biosimilars or chimeric products of any of the preceding compounds, such as for example the CT-P13 Infliximab biosimilar, or small molecule based compound such as thalidomide, lenalidomide, pomalidomide, a xanthane derivative such as pentoxifylline, bupropion, an 5-HT_{2A} agonist such as (R)DOI, TCB2, LSD and LA-SS-Az; or a natural compound such as curcumin, catechins, cannabidiol or Echinacea purpurea.

[0084] When used herein, “expression level” refers to quantifying the number of mRNA copies transcribed from a gene. Generally this number will not be an absolute value but a relative value, and therefore is preferably normalized for example in reference to the expression of one or more housekeeping genes. Housekeeping genes are genes which are assumed to have constant expression levels independent of cell type and/or functional status of the cell (i.e. from a diseased or healthy subject), and therefore can be used to normalize experimentally determined relative expression levels. Housekeeping genes are generally known to the skilled person, non-limiting examples of housekeeping genes that may be used for normalization are beta-actin, glyceraldehyde-3-phosphate dehydrogenase (GAPDH) and Transcription factor IID TATA binding protein (TBP).

[0085] Therefore the phrase “expression level of a target gene” denotes a value that is representative of the amount, e.g. a concentration, of a target gene present in a sample. This value may be based on the amount of a transcription product of the target gene (e.g. mRNA) or a translation product thereof (e.g. protein). Preferably, the expression level is based on the amount of mRNA formed from the target gene. In order to determine the expression level, techniques such as qPCR, multiple qPCR, multiplexed qPCR, ddPCR, RNAseq, RNA expression array or mass spectrometry may be used. For example, a gene expression microarray, e.g. Affymetrix microarray, or RNA sequencing methods, like an Illumina sequencer, can be used.

[0086] When used herein, the term “sample” also encompasses the case where e.g. a tissue of the subject have been taken from the subject and, e.g., have been put on a microscope slide, and where for performing the claimed method a portion of this sample is extracted, e.g., by means of Laser Capture Microdissection (LCM), or by scraping off the cells of interest from the slide, or by fluorescence-activated cell sorting techniques. Preferably the sample is obtained form or is a biopsy. The biopsy or sample may be obtained from a healthy subject (e.g. to serve as a reference sample) or from a subject suffering from IBD. Preferably the sample is a gastric, colon, intestinal or rectal sample, therefore in a preferred embodiment the biopsy used to provide the sample is a gastric, colon, intestinal or rectal biopsy.

[0087] The terms “healthy subject” or “healthy reference subject” or “healthy control subject” are used interchangeably, and when used herein refer to a subject not having IBD.

[0088] Alternatively, the predictions referred herein may be based on inferred cellular signaling pathway activity. Therefore in an alternative of the first aspect the invention relates to a method for predicting the treatment response of a subject suffering from inflammatory bowel disease (IBD) to treatment with an anti-TNFalpha compound based on inferred cellular signaling pathway activity or activities in a sample obtained from the subject, the method comprising:
[0089] comparing the inferred cellular signaling pathway activity, or when multiple cellular signaling pathway activities are used the combined cellular signaling pathway activities, with a threshold value;
[0090] wherein the cellular signaling pathway is one or more cellular signaling pathway selected from TGFbeta, NFkB, MAPK-AP1, STAT3 and WNT, preferably wherein the cellular signaling pathway is one or more cellular signaling pathway selected from TGFbeta and NFkB;
[0091] wherein the cellular signaling pathway activity or activities are inferred by
[0092] determining an activity level of a transcription factor (TF) element of the respective cellular signaling pathway in the sample obtained from the subject, the TF element controlling transcription of three or more target genes of the respective cellular signaling pathway, the determining being based on evaluating a calibrated mathematical pathway model relating the expression levels of the three or more target genes of the respective cellular signaling pathway to the activity level of the TF element of the cellular signaling pathway, and
[0093] inferring the activity of the cellular signaling pathway in the subject based on the determined activity level of the TF element of the respective cellular signaling pathway in the sample of the subject;
[0094] wherein the treatment response is predicted to be favorable when the inferred cellular signaling pathway activity or the combined cellular signaling pathway activities are below the threshold value, and wherein the treatment response is predicted to be unfavorable when the inferred cellular signaling pathway activity or the combined cellular signaling pathway activities are above the threshold value.

[0095] In an embodiment the activity of the respective cellular signaling pathway being defined by the activity level of the respective TF elements. In an embodiment the calibrated mathematical pathway model being a model that is calibrated using a ground truth dataset including samples in which transcription of the three or more target genes is induced by the respective TF elements and samples in which transcription of the three or more target genes is not induced by the respective TF elements. The TF for the relevant cellular signaling pathways described herein are listed below.

[0096] In an embodiment the IBD is ulcerative colitis (UC) or Crohn Disease (CD). In an embodiment the threshold value is independently determined in one or more reference samples. In an embodiment the three or more, e.g. three, four, five, six, seven, eight, nine, ten, eleven or twelve or more, target genes of the TGFbeta cellular signaling pathway are selected from ANGPTL4, CDC42EP3, CDKNIA, CDKN2B, CTGF, GADD45A, GADD45B, HMGA2, ID1, IL11, SERPINE1, INPP5D, JUNB, MMP2, MMP9, NKX2-5, OVOL1, PDGFB, PTHLH, SGK1, SKIL, SMAD4, SMAD5, SMAD6, SMAD7, SNAI1, SNAI2, TIMP1, and VEGFA, preferably, from the group consisting of: ANGPTL4, CDC42EP3, CDKNIA, CTGF, GADD45A, GADD45B, HMGA2, ID1, IL11, JUNB, PDGFB, PTHLH, SERPINE1, SGK1, SKIL, SMAD4, SMAD5, SMAD6, SMAD7, SNAI2, VEGFA, more preferably, from the group consisting of: ANGPTL4, CDC42EP3, CDKNIA, CTGF, GADD45B, ID1, IL11, JUNB, SERPINE1, PDGFB, SKIL, SMAD7, SNAI2, and VEGFA, more preferably, from the group consisting of: ANGPTL4, CDC42EP3, ID1, IL11, JUNB, SERPINE1, SKIL, and SMAD7; the three or more, e.g. three, four, five, six, seven, eight, nine, ten, eleven or twelve or more, target genes of the NFkB cellular signaling pathway are selected from BCL2L1, BIRC3, CCL2, CCL3, CCL4, CCL5, CCL20, CCL22, CX3CL1, CXCL1, CXCL2, CXCL3, ICAM1, IL1B, IL6, IL8, IRF1, MMP9, NFKB2, NFKBIA, NFKB IE, PTGS2, SELE, STAT5A, TNF, TNFAIP2, TNIP1, TRAF1, and VCAM1; the three or more, e.g. three, four, five, six, seven, eight, nine, ten, eleven or twelve or more, target genes of the MAPK-AP1 cellular signaling pathway are selected from BCL2L11, CCND1, DDIT3, DNMT1, EGFR, ENPP2, EZR, FASLG, FIGF, GLRX, IL2, IVL, LOR, MMP1, MMP3, MMP9, SERPINE1, PLAU, PLAUR, PTGS2, SNCG, TIMP1, TP53, and VIM, preferably, from the group consisting of: CCND1, EGFR, EZR, GLRX, MMP1, MMP3, PLAU, PLAUR, SERPINE1, SNCG, and TIMP1; the three or more, e.g. three, four, five, six, seven, eight, nine, ten, eleven or twelve or more, target genes of the STAT3 cellular signaling pathway are selected from AKT1, BCL2, BCL2L1, BIRC5, CCND1, CD274, CDKN1A, CRP, FGF2, FOS, FSCN1, FSCN2, FSCN3, HIF1A, HSP90AA1, HSP90AB1, HSP90B1, HSPA1A, HSPA1B, ICAM1, IFNG, IL10, JUNB, MCL1, MMP1, MMP3, MMP9, MUC1, MYC, NOS2, POU2F1, PTGS2, SAA1, STAT1, TIMP1, TNFRSF1B, TWIST1, VIM, and ZEB1, preferably, either from the group consisting of: BCL2L1, BIRC5, CCND1, CD274, FOS, HIF1A, HSP90AA1, HSP90AB1, MMP1, and MYC, or from the group consisting of: BCL2L1, CD274, FOS, HSP90B1, HSPA1B, ICAM1, IFNG, JUNB, PTGS2, STAT1, TNFRSF1B, and ZEB1; the three or more, e.g. three, four, five, six, seven, eight, nine, ten, eleven or twelve or more, target genes of the WNT cellular signaling pathway are selected from KIAA1199, AXIN2, RNF43, TBX3, TDGF1, SOX9, ASCL2, IL8, SP5, ZNRF3, KLF6, CCND1, DEFA6 and FZD7, optionally further at least one target gene, e.g. one, two three, four, five six, seven, eight, nine, ten or more target gene(s), selected from the group comprising or consisting of: NKD1, OAT, FAT1, LEF1, GLUL, REG1B, TCF7L2, COL18A1, BMP7, SLC1A2, ADRA2C, PPARG, DKK1, HNF1A and LECT2. In an embodiment the sample obtained from the subject is a gastric, colon, intestinal or rectal sample.

[0097] By using a calibrated mathematical model to relate the gene expression levels to a cellular signaling pathway activity, a numerical value can be assigned to the pathway activity. Depending on the model, this value can for example be normalize to result in a value from 0 to 100, where 0 is no pathway activity and 100 is theoretical maximum pathway activity. Alternatively the value may be normalized such that the average value is 0 and thus decreased pathway activity is represented by a negative value and increased pathway activity is represented by a positive value. It is understood that the values obtained using such model are dependent on the model used, and do not represent absolute values. Therefore, the same model should be used for calibrating, determining reference values and when used in the method of the invention, so that it allows comparison of the obtained numerical values for pathway activity.

[0098] Therefore, the numerical value obtained for a pathway activity in a sample for a specific state (e.g. responder to treatment with an anti-TNF-alpha compound) may be compared to the numerical value obtained for that pathway activity in a reference sample (e.g. non-responder to treatment with an anti-TNF-alpha compound). By performing such comparison a statement can be made about the pathway activity in the sample (e.g. a sample from a biopsy from a subject with IBD) relative to the pathway activity determined in the reference sample (e.g. a sample from a biopsy). Based on the numerical value a statement can be made about the pathway activity in the sample with respect to the pathway activity in the reference sample, e.g. whether the pathway activity in the sample is higher or lower, in correspondence with the numerical value obtained for the pathway activity. E.g. cellular signaling pathway activity can be determined in a biopsy sample from a subject not responding to treatment with an anti-TNF-alpha compound. Since it is determined by the inventors that the TGFbeta, NFkB, MAPK-AP1, STAT3 and WNT cellular signaling pathway activities in non-responders to anti-TNF-alpha treatment are higher (in a sample from a biopsy obtained pre-treatment), these can bet set as a baseline numerical values representing an high pathway activities, i.e. the reference value. Similarly baseline numerical values can be set for low activities for these pathways representing the lower value obtained from samples form biopsies obtained from responders to anti-TNFalpha treatment. By determining the numerical value for one of the TGFbeta, NFkB, MAPK-AP1, STAT3 or WNT cellular signaling pathway activity in the sample from a biopsy of a subject with IBD, the numerical value representing that pathway activity can be compared with the reference values, and it can be determined whether the pathway activity is high or low, by comparing with the references based on the numerical values. The comparison may be made with multiple reference samples to allow for more accurate results and statistics to be performed.

[0099] Alternatively a reference sample can be used to set a baseline pathway activity, allowing further comparison of the pathway activity. For example, the average and standard deviation can be calculated which can be used to calculate values for a healthy individual, and define a threshold for abnormal pathway activity. Alternatively a reference can be used with a known state (e.g. severe infection) and used in the comparison of the pathway activity/activities.

[0100] Therefore, in a preferred embodiment the pathway activity is determined to be higher or lower when the obtained numerical value for the pathway activity differs with at least one standard deviation from the numerical value obtained for the pathway activity in the reference sample. When the value is within the range of one standard deviation it is said to be equal or comparable to the pathway activity in the reference sample. It is understood that the threshold may also be set higher, for example 2 times the standard deviation or even 3 times the standard deviation. It is further understood that the threshold may be determined using alternative ways, e.g. statistical methods, to determine a significant deviation from the reference value.

[0101] It is understood that the reference value for a certain pathway activity in a sample in principle only needs to be determined once. Therefore, the step of determining a reference pathway activity is not part of the methods of the invention, as a predetermined reference pathway activity can be used.

[0102] For the purpose of the invention determining the expression levels of the target genes based on the extracted RNA may be a part of the method, meaning the method includes the step of determining the expression levels of the target genes on RNA extracted from the sample obtained from the patient using methods known to the skilled person or described herein. The method may further include the step of obtaining a sample form the patient in order to extract the RNA. Alternatively the expression levels may have been determined separately and the demining step (of the expression levels of the target genes) is not an active step in the method of the invention. In such case the expression levels are provided as an input value, e.g. a relative expression level in reference to one or more control gene expression levels.

[0103] Sets of cellular signaling pathway target genes whose expression levels are preferably analyzed have been identified, alternatively methods for identifying suitable target genes are described herein. For use to determine pathway activity, for example by a mathematical model, three or more, for example, three, four, five, six, seven, eight, nine, ten, eleven, twelve or more, target genes from each assessed cellular signaling pathway can be analyzed to determine pathway activities.

[0104] In an embodiment the signaling pathway measurements are performed using qPCR, multiple qPCR, multiplexed qPCR, ddPCR, RNAseq, RNA expression array or mass spectrometry. For example, a gene expression microarray data, e.g. Affymetrix microarray, or RNA sequencing methods, like an Illumina sequencer, can be used.

[0105] The terms “pathway”, “signal transduction pathway”, “signaling pathway” and “cellular signaling pathway” are used interchangeably herein.

[0106] An “activity of a signaling pathway” may refer to the activity of a signaling pathway associated transcription factor (TF) element in the sample, the TF element controlling transcription of target genes, in driving the target genes to expression, i.e., the speed by which the target genes are transcribed, e.g. in terms of high activity (i.e. high speed) or low activity (i.e. low speed), or other dimensions, such as levels, values or the like related to such activity (e.g. speed). Accordingly, for the purposes of the present invention, the term “activity”, as used herein, is also meant to refer to an activity level that may be obtained as an intermediate result during “pathway analysis” as described herein.

[0107] The term “transcription factor element” (TF element), as used herein, preferably refers to an intermediate or precursor protein or protein complex of the active transcription factor, or an active transcription factor protein or protein complex which controls the specified target gene expression. For example, the protein complex may contain at least the intracellular domain of one of the respective signaling pathway proteins, with one or more co-factors, thereby controlling transcription of target genes. Preferably, the term refers to either a protein or protein complex transcriptional factor triggered by the cleavage of one of the respective signaling pathway proteins resulting in a intracellular domain.

[0108] The term “target gene”, as used herein, means a gene whose transcription is directly or indirectly controlled by a respective transcription factor element. The “target gene” may be a “direct target gene” and/or an “indirect target gene” (as described herein).

[0109] Pathway analysis enables quantitative measurement of signal transduction pathway activity in cells, e.g. of a sample, based on inferring activity of a signal transduction pathway from measurements of mRNA levels of the well-validated direct target genes of the transcription factor associated with the respective signaling pathway (see for example W Verhaegh et al., 2014, supra; W Verhaegh, A van de Stolpe, Oncotarget, 2014, 5(14):5196).

[0110] Preferably the determining of the activity or activities of the signaling pathway(s), the combination of multiple pathway activities and applications thereof is performed as described for example in the following documents, each of which is hereby incorporated in its entirety for the purposes of determining activity of the respective signaling pathway: published international patent applications WO2013011479 (titled “ASSESSMENT OF CELLULAR SIGNALING PATHWAY ACTIVITY USING PROBABILISTIC MODELING OF TARGET GENE EXPRESSION”), WO2014102668 (titled “ASSESSMENT OF CELLULAR SIGNALING PATHWAY ACTIVITY USING LINEAR COMBINATION(S) OF TARGET GENE EXPRESSIONS”), WO2015101635 (titled “ASSESSMENT OF THE PI3K CELLULAR SIGNALING PATHWAY ACTIVITY USING MATHEMATICAL MODELLING OF TARGET GENE EXPRESSION”), WO2016062891 (titled “ASSESSMENT OF TGF-β CELLULAR SIGNALING PATHWAY ACTIVITY USING MATHEMATICAL MODELLING OF TARGET GENE EXPRESSION”), WO2017029215 (titled “ASSESSMENT OF NFKB CELLULAR SIGNALING PATHWAY ACTIVITY USING MATHEMATICAL MODELLING OF TARGET GENE EXPRESSION”), WO2014174003 (titled “MEDICAL PROGNOSIS AND PREDICTION OF TREATMENT RESPONSE USING MULTIPLE CELLULAR SIGNALLING PATHWAY ACTIVITIES”), WO2016062892 (titled “MEDICAL PROGNOSIS AND PREDICTION OF TREATMENT RESPONSE USING MULTIPLE CELLULAR SIGNALING PATHWAY ACTIVITIES”), WO2016062893 (titled “MEDICAL PROGNOSIS AND PREDICTION OF TREATMENT RESPONSE USING MULTIPLE CELLULAR SIGNALING PATHWAY ACTIVITIES”), WO2018096076 (titled “Method to distinguish tumor suppressive FOXO activity from oxidative stress”), and in the patent applications WO2018096076 (titled “Method to distinguish tumor suppressive FOXO activity from oxidative stress”), WO2019068585 (titled “Assessment of Notch cellular signaling pathway activity using mathematical modelling of target gene expression”), WO2019120658 (titled “Assessment of MAPK-MAPK-AP1 cellular signaling pathway activity using mathematical modelling of target gene expression”), WO2019068543 (titled “Assessment of JAK-JAK-STAT3 cellular signaling pathway activity using mathematical modelling of target gene expression”), WO2019068562 (titled “Assessment of JAK-STAT1/2 cellular signaling pathway activity using mathematical modelling of target gene expression”), and WO2019068623 (titled “Determining functional status of immune cells types and immune response”).

[0111] The models have been biologically validated for ER, AR, PI3K-FOXO, HH, Notch, TGF-β, Wnt, NFkB, JAK-STAT1/2, JAK-JAK-STAT3 and MAPK-MAPK-AP1 pathways on several cell types.

[0112] Unique sets of cellular signaling pathway target genes whose expression levels are preferably analyzed have been identified. For use in the mathematical models, three or more, for example, three, four, five, six, seven, eight, nine, ten, eleven, twelve or more, target genes from each assessed cellular signaling pathway can be analyzed to determine pathway activities.

[0113] Common to the pathway analysis methods for determining the activities of the different signaling pathways as disclosed herein is a concept, which is preferably applied herein for the purposes of the present invention, wherein the activity of a signaling pathway in a cell such as a cell present in a sample is determinable by receiving expression levels of one or more, preferably three or more, target genes of the signaling pathway, determining an activity level of a signaling pathway associated transcription factor (TF) element in the sample, the TF element controlling transcription of the three or more target genes, the determining being based on evaluating a calibrated mathematical pathway model relating expression levels of the one or more, preferably three or more target genes to the activity level of the signaling pathway, and optionally inferring the activity of the signaling pathway in the cell present in a sample based on the determined activity level of the signaling pathway associated TF element. As described herein, the activity level can be directly used as an input to determine the immune response in a subject and/or determine whether an infection is viral and/or determine the severity of a viral infection and/or determine the cellular immunity conferred by a vaccine, which is also contemplated by the present invention.

[0114] The term “activity level” of a TF element, as used herein, denotes the level of activity of the TF element regarding transcription of its target genes.

[0115] The calibrated mathematical pathway model may be a probabilistic model, preferably a Bayesian network model, based on conditional probabilities relating the activity level of the signaling pathway associated TF element and the expression levels of the three or more target genes, or the calibrated mathematical pathway model may be based on one or more linear combination(s) of the expression levels of the three or more target genes. For the purposes of the present invention, the calibrated mathematical pathway model is preferably a linear model, or a Bayesian network model based on conditional probabilities.

[0116] In particular, the determination of the expression level and optionally the inferring of the activity of a signaling pathway in the subject may be performed, for example, by inter alia (i) evaluating a portion of a calibrated probabilistic pathway model, preferably a Bayesian network, representing the cellular signaling pathways for a set of inputs including the expression levels of the three or more target genes of the cellular signaling pathway measured in a sample of the subject, (ii) estimating an activity level in the subject of a signaling pathway associated transcription factor (TF) element, the signaling pathway associated TF element controlling transcription of the three or more target genes of the cellular signaling pathway, the estimating being based on conditional probabilities relating the activity level of the signaling pathway associated TF element and the expression levels of the three or more target genes of the cellular signaling pathway measured in the sample of the subject, and optionally (iii) inferring the activity of the cellular signaling pathway based on the estimated activity level of the signaling pathway associated TF element in the sample of the subject. This is described in detail in the published international patent application WO 2013/011479 A2 (“Assessment of cellular signaling pathway activity using probabilistic modeling of target gene expression”), the contents of which are herewith incorporated in their entirety.

[0117] In an exemplary alternative, the determination of the expression level and optionally the inferring of the activity of a cellular signaling pathway in the subject may be performed by inter alia (i) determining an activity level of a signaling pathway associated transcription factor (TF) element in the sample of the subject, the signaling pathway associated TF element controlling transcription of the three or more target genes of the cellular signaling pathway, the determining being based on evaluating a calibrated mathematical pathway model relating expression levels of the three or more target genes of the cellular signaling pathway to the activity level of the signaling pathway associated TF element, the mathematical pathway model being based on one or more linear combination(s) of expression levels of the three or more target genes, and optionally (ii) inferring the activity of the cellular signaling pathway in the subject based on the determined activity level of the signaling pathway associated TF element in the sample of the subject. This is described in detail in the published international patent application WO 2014/102668 A2 (“Assessment of cellular signaling pathway activity using linear combination(s) of target gene expressions”).

[0118] Further details regarding the inferring of cellular signaling pathway activity using mathematical modeling of target gene expression can be found in W Verhaegh et al., “Selection of personalized patient therapy through the use of knowledge-based computational models that identify tumor-driving signal transduction pathways”, Cancer Research, Vol. 74, No. 11, 2014, pages 2936 to 2945.

[0119] To facilitate rapid identification of references, the above-mentioned references have been assigned to each signaling pathway of interest here and exemplarily corresponding target genes suitable for determination of the signaling pathway's activity have been indicated.

[0120] Particularly preferred is a method wherein the inferring comprises: inferring activity of a Wnt cellular signaling pathway in the sample based at least on expression levels of three or more, e.g. three, four five six seven, eight, nine, ten eleven, twelve or thirteen or more, target gene(s) of the Wnt pathway measured in the sample selected from the group comprising or consisting of KIAA1199, AXIN2, RNF43, TBX3, TDGF1, SOX9, ASCL2, IL8, SP5, ZNRF3, KLF6, CCND1, DEFA6 and FZD7, optionally the inferring is further based on expression levels of at least one target gene, e.g. one, two three, four, five six, seven, eight, nine, ten or more target gene(s), of the Wnt pathway measured in the sample selected from the group comprising or consisting of NKD1, OAT, FAT1, LEF1, GLUL, REG1B, TCF7L2, COL18A1, BMP7, SLC1A2, ADRA2C, PPARG, DKK1, HNF1A and LECT2;
[0121] inferring activity of a AR cellular signaling pathway in the sample based at least on expression levels of three or more, e.g. three, four five six seven, eight, nine, ten eleven, twelve or thirteen, target gene(s) of the AR pathway measured in the sample selected from the group comprising or consisting of KLK2, PMEPA1, TMPRSS2, NKX3_1, ABCC4, KLK3, FKBP5, ELL2, UGT2B15, DHCR24, PPAP2A, NDRG1, LRIG1, CREB3L4, LCP1, GUCY1A3, AR and EAF2, optionally the inferring is further based on expression levels of at least one target gene, e.g. one, two, three, four, five, six, seven, eight, nine, ten eleven twelve or more target gene(s), of the AR pathway measured in the sample selected from the group comprising or consisting of APP, NTS, PLAU, CDKN1A, DRG1, FGF8, IGF1, PRKACB, PTPN1, SGK1 and TACC2;
[0122] inferring activity of a TGFbeta cellular signaling pathway in the sample based at least on expression levels of three or more, e.g. three, four five six seven, eight, nine, ten eleven, twelve or thirteen, target gene(s) of the TGFbeta pathway measured in the sample selected from the group comprising or consisting of ANGPTL4, CDC42EP3, CDKNIA, CDKN2B, CTGF, GADD45A, GADD45B, HMGA2, ID1, IL11, SERPINE1, INPP5D, JUNB, MMP2, MMP9, NKX2-5, OVOL1, PDGFB, PTHLH, SGK1, SKIL, SMAD4, SMAD5, SMAD6, SMAD7, SNAI1, SNAI2, TIMP1, and VEGFA, preferably, from the group consisting of ANGPTL4, CDC42EP3, CDKNIA, CTGF, GADD45A, GADD45B, HMGA2, ID1, IL11, JUNB, PDGFB, PTHLH, SERPINE1, SGK1, SKIL, SMAD4, SMAD5, SMAD6, SMAD7, SNAI2, VEGFA, more preferably, from the group consisting of ANGPTL4, CDC42EP3, CDKNIA, CTGF, GADD45B, ID1, IL11, JUNB, SERPINE1, PDGFB, SKIL, SMAD7, SNAI2, and VEGFA, more preferably, from the group consisting of ANGPTL4, CDC42EP3, ID1, IL11, JUNB, SERPINE1, SKIL, and SMAD7;
[0123] inferring activity of a NFkB cellular signaling pathway in the sample based at least on expression levels of three or more, e.g. three, four five six seven, eight, nine, ten eleven, twelve or thirteen, target gene(s) of the NFkB pathway measured in the sample selected from the group comprising or consisting of: BCL2L1, BIRC3, CCL2, CCL3, CCL4, CCL5, CCL20, CCL22, CX3CL1, CXCL1, CXCL2, CXCL3, ICAM1, IL1B, IL6, IL8, IRF1, MMP9, NFKB2, NFKBIA, NFKB IE, PTGS2, SELE, STAT5A, TNF, TNFAIP2, TNIP1, TRAF1, and VCAM1;
[0124] inferring activity of a JAK-STAT1/2 cellular signaling pathway in the sample based at least on expression levels of three or more, e.g. three, four five six seven, eight, nine, ten eleven, twelve or thirteen, target gene(s) of the JAK-STAT1/2 pathway measured in the sample selected from the group comprising or consisting of: BID, GNAZ, IRF1, IRF7, IRF8, IRF9, LGALS1, NCF4, NFAM1, OAS1, PDCD1, RAB36, RBX1, RFPL3, SAMM50, SMARCB1, SSTR3, ST13, STAT1, TRMT1, UFDIL, USP18, and ZNRF3, preferably, from the group consisting of: IRF1, IRF7, IRF8, IRF9, OAS1, PDCD1, ST13, STAT1, and USP18.
[0125] inferring activity of a JAK-STAT3 cellular signaling pathway in the sample based at least on expression levels of three or more, e.g. three, four five six seven, eight, nine, ten eleven, twelve or thirteen, target gene(s) of the JAK-STAT3 pathway measured in the sample selected from the group comprising or consisting of: AKT1, BCL2, BCL2L1, BIRC5, CCND1, CD274, CDKN1A, CRP, FGF2, FOS, FSCN1, FSCN2, FSCN3, HIF1A, HSP90AA1, HSP90AB1, HSP90B1, HSPA1A, HSPA1B, ICAM1, IFNG, IL10, JUNB, MCL1, MMP1, MMP3, MMP9, MUC1, MYC, NOS2, POU2F1, PTGS2, SAA1, STAT1, TIMP1, TNFRSF1B, TWIST1, VIM, and ZEB1, preferably, either from the group consisting of: BCL2L1, BIRC5, CCND1, CD274, FOS, HIF1A, HSP90AA1, HSP90AB1, MMP1, and MYC, or from the group consisting of: BCL2L1, CD274, FOS, HSP90B1, HSPA1B, ICAM1, IFNG, JUNB, PTGS2, STAT1, TNFRSF1B, and ZEB1;
[0126] inferring activity of a MAPK-AP1 cellular signaling pathway in the sample based at least on expression levels of three or more, e.g. three, four five six seven, eight, nine, ten eleven, twelve or thirteen, target gene(s) of the MAPK-AP1 pathway measured in the sample selected from the group comprising or consisting of: BCL2L11, CCND1, DDIT3, DNMT1, EGFR, ENPP2, EZR, FASLG, FIGF, GLRX, IL2, IVL, LOR, MMP1, MMP3, MMP9, SERPINE1, PLAU, PLAUR, PTGS2, SNCG, TIMP1, TP53, and VIM, preferably, from the group consisting of: CCND1, EGFR, EZR, GLRX, MMP1, MMP3, PLAU, PLAUR, SERPINE1, SNCG, and TIMP1;

[0127] Herein, a Wnt transcription factor (TF) element is defined to be a protein complex containing at least one of the TCF/LEF TF family members, i.e., TCF1, TCF3, TCF4 or LEF1, preferably wherein the Wnt TF element comprises beta-catenin/TCF4, which is capable of binding to specific DNA sequences, thereby controlling transcription of target genes.

[0128] Herein, an AR transcription factor (TF) element is defined to be a protein complex containing at least one or preferably a dimer of nuclear Androgen receptor.

[0129] Herein, the term “TGFbeta transcription factor element” or “TGFbeta TF element” or “TF element” when referring to the TGFbeta pathway is defined to be a protein complex containing at least one or, preferably, a dimer of the TGFbeta members (SMAD1, SMAD2, SMAD3, SMAD5 and SMAD8 with SMAD4) or a trimer (two proteins from SMAD1, SMAD2, SMAD3, SMAD5 and SMAD8 with SMAD4), which is capable of binding to specific DNA sequences, thereby controlling transcription of target genes. Preferably, the term refers to either a protein or protein complex transcriptional factor triggered by the binding of TGFbeta to its receptor or an intermediate downstream signaling agent between the binding of TGFbeta to its receptor and the final transcriptional factor protein or protein complex. For example, it is known that TGFbeta binds to an extracellular TGFbeta receptor that initiates an intracellular “SMAD” signaling pathway and that one or more SMAD proteins (receptor-regulated or R-SMADs (SMAD1, SMAD2, SMAD 3, SMAD5 and SMAD8) and SMAD4) participate in, and may form a hetero-complex which participates in, the TGFbeta transcription signaling cascade which controls expression.

[0130] Herein, an NFkB transcription factor (TF) element is defined to be a protein complex containing at least one or, preferably, a dimer of the NFkB members (NFKB 1 or p50/p105, NFKB2 or p52/p100, RELA or p65, REL, and RELB), which is capable of binding to specific DNA sequences, thereby controlling transcription of target genes.

[0131] Herein, the term “JAK-STAT1/2 transcription factor element” or “JAK-STAT1/2 TF element” or “TF element” when referring to the JAK-STAT1/2 is defined to be a protein complex containing at least a STAT1-STAT2 heterodimer or a STAT1 homodimer, which is capable of binding to specific DNA sequences, preferably the ISRE (binding motif AGTTTC NTTCNC/T) or GAS (binding motif TTC/A NNG/TAA) response elements, respectively, thereby controlling transcription of target genes. Preferably, the term refers to either a protein or protein complex transcriptional factor that is formed by different stimuli such as IFNs triggered by the binding of the stimulating ligand to its receptor resulting in downstream signaling.

[0132] Herein, the term “JAK-STAT3 transcription factor element” or “JAK-STAT3 TF element” or “TF element” when referring to the JAK-STAT3 pathway is defined to be a protein complex containing at least a STAT3 homodimer, which is capable of binding to specific DNA sequences, preferably the response elements with binding motif CTGGGAA, thereby controlling transcription of target genes. Preferably, the term refers to either a protein or protein complex transcriptional factor triggered by the binding of STAT3 inducing ligands such as interleukin-6 (IL-6) and IL-6 family cytokines to its receptor or an intermediate downstream signaling agent between the binding the ligand to its receptor and the final transcriptional factor protein or protein complex.

[0133] Herein, the term “AP-1 transcription factor element” or “AP-1 TF element” or “TF element” when referring to the MAPK-AP1 pathway is defined to be a protein complex containing at least a member of the Jun (e.g. c-Jun, JunB and JunD) family and/or a member of the Fos (e.g. c-Fos, FosB, Fra-1 and Fra-2) family and/or a member of the ATF family and/or a member of the JDP family, forming e.g. Jun˜Jun or Jun˜Fos dimers, capable of binding to specific DNA sequences, preferably the response elements 12-0-Tetradecanoylphorbol-l3-acetate (TPA) response element (TRE) with binding motif 5′-TGA G/C TCA-3′ or cyclic AMP response element (CRE) with binding motif 5′-TGACGTCA-3′, thereby controlling transcription of target genes. Preferably, the term refers to either a protein or protein complex transcriptional factor triggered by the binding of AP-1 inducing ligands, such as growth factors (e.g., EGF) and cytokines, to its receptor or an intermediate downstream signaling agent, or triggered by the presence of an AP-1-activating mutation.

[0134] In an embodiment, the three or more, e.g. three, four, five, six seven, eight, nine, ten, eleven or twelve or more, expression levels are combined by adding up their relative expression levels, with the proviso that the expression levels of the genes CDKN2B, HMGA2, OVOL1, SMAD4, BCL2L11, HNF1A or TCF7L2 are multiplied with a weight factor of −1. Preferably wherein the combined expression levels are compared to a threshold value to determine whether the treatment response is favorable or not favorable, wherein the treatment response is predicted to be favorable when the combined three or more expression levels are below the threshold value, and wherein the treatment response is predicted to be unfavorable when the combined three or more expression levels are above the threshold value.

[0135] When used herein, relative expression level refers to the quantitative value obtained for the expression level of the gene which has been normalized, e.g. by using a housekeeping gene or genes, to correct for sample variation.

[0136] A threshold value for the combined expression levels can be set from reference samples with a known status, meaning reference samples obtained from IBD patient pre-treatment from which it is known whether they are responders or non-responders. Since the combined expression values represents a set of numerical values, an average can be calculated for a specific set of genes (i.e. three or more genes selected form the list identified above) and for a specific status (i.e. responder or non-responder). Based on these values a threshold can be set. For example the threshold can be set as the median between responders and non-responders, or can be set such that a predetermined percentage of responders or non-responders fall above or below the set value. Such methods are known to the skilled artisan. Setting such threshold value for a specific set of genes allows for easy comparison of the value obtained a sample form a subject suffering from IBD, and quickly diagnosing whether the subject would benefit from anti-TNF-alpha treatment. It is particularly preferred to combine the three or more expression levels by adding up the logarithmic values of their relative expression levels, preferably the log 2 values.

[0137] In an embodiment the IBD is Ulcerative Colitis (UC) or Crohn Disease (CD). As can be derived particularly from FIGS. 5 to 20, the target genes selected from the TGFbeta, NFkB, MAPK-AP1, STAT3 and WNT cellular signaling pathways are predictive for both subjects suffering from UC and CD.

[0138] For patients for whom no pre-treatment sample or biopsy is available to predict the treatment response and who are currently undergoing treatment with an anti-TNF-alpha compound, it may be desirable to determine the effectiveness of the treatment. Alternatively, if a treatment prediction was made and this was followed up with treatment with an anti-TNFalpha compound in the subject, it may still be desirable to follow up this treatment to see if it is effective or not and thus whether treatment should be continued.

Therefore, in a second aspect, the invention relates to a method for determining the effectiveness of a treatment of a subject suffering from IBD with an anti-TNFalpha compound based on the expression levels of two or more genes,
[0139] wherein if the IBD is UC, the two or more, e.g. two, three, four, five, six, seven, eight, nine, ten, eleven, twelve or more, genes are selected from the group consisting of BCL2L11, CDKN1A, DNMT1, EAF2, ELL2, ENPP2, FKBP5, GLRX, LCP1, MMP1, MMP3, MMP9, PLAU, PLAUR, PMEPA1, PRKACB, PTGS2, SERPINE1, SGK1, TIMP1, TMPRSS2 and VIM; or
[0140] wherein the IBD is CD, the two or more, e.g. two, three, four, five, six, seven, eight, nine, ten, eleven, twelve or more, genes are selected from the group consisting of BCL2L1, BCL2L11, BIRC3, CCL2, CCL22, CCL3, CCL4, CCL5, CX3CL1, CXCL1, CXCL2, CXCL3, DNMT1, ENPP2, GLRX, ICAM1, IL1B, IL6, IL8, IRF1, MMP1, MMP3, MMP9, NFKB2, NFKBIA, NFKBIE, PLAU, PLAUR, PTGS2, SELE, SERPINE1, STAT5A, TIMP1, TNF, TNFAIP2, TRAF1, VCAM1 and VIM;
[0141] wherein the three or more expression levels are used to determine whether the treatment of IBD in the patient with an anti-TNFalpha compound is effective or not effective,
[0142] wherein a decreased expression level of BCL2L11 or PRKACB or an increased expression level of any of the other genes corresponds to a not effective treatment, and
[0143] wherein an increased expression level of BCL2L11 or PRKACB or a decreased expression level of any of the other genes corresponds to an effective treatment.

[0144] As can be derived from FIGS. 5 to 20, the AR and MAPK-AP1 (for UC) or MAPK-AP1 and NFkB (for CD) cellular signaling pathway activities in post treatment patient samples undergoing treatment with an anti-TNFalpha compound are indicative if a subject is responding well to treatment with an anti-TNFalpha compound even when no pre-treatment information is available. Therefore the curated lists for these pathways can be used to predict treatment effectiveness. The listed target genes have been selected in the same manner as for treatment response, based on pathways with significant different pathway activity between states (effective treatment vs non-effective treatment), where the pathway genes are curated based on the genes contributing most to the pathway score. For treatment effectiveness predictions, different pathways were found to be significant when comparing UC and CD patients, so distinct target genes groups are selected depending on the exact diagnosis of the IBD (being UC or CD).

[0145] When used herein, treatment effectiveness refers to whether a subject having IBD responds favorably to treatment with an anti-TNFalpha compound as determined after onset of the treatment. Favorably can be defined herein as an improvement in the overall grade using the grading systems for UC and CD referred above.

[0146] In a preferred embodiment wherein if the IBD is UC and the two or more genes are selected from the group consisting of EAF2, ELL2, FKBP5, GLRX, LCP1, MMP1, MMP3, MMP9, PLAU, PLAUR, PMEPA1, PTGS2, SERPINE1, TIMP1, TMPRSS2 and VIM.

[0147] In a preferred embodiment wherein if the IBD is CD and the two or more genes are selected from the group consisting of BCL2L1, BIRC3, CCL2, CCL22, CCL3, CCL4, CCL5, CX3CL1, CXCL1, CXCL2, CXCL3, GLRX, ICAM1, IL1B, IL6, IL8, IRF1, MMP1, MMP3, MMP9, NFKB2, NFKBIA, NFKBIE, PLAU, PLAUR, PTGS2, SELE, SERPINE1, STAT5A, TIMP1, TNF, TNFAIP2, TRAF1, VCAM1 and VIM.

[0148] In an embodiment the two or more expression levels are combined by adding up their relative expression levels, with the proviso that the expression levels of the genes BCL2L11 or PRKACB are multiplied with a weight factor of −1,
[0149] preferably wherein the combined expression levels are compared to a threshold value to determine whether the treatment is effective or not effective, wherein the treatment is predicted to be effective when the combined two or more expression levels are below the threshold value, and wherein the treatment is predicted not to be effective when the combined two or more expression levels are above the threshold value.

[0150] Alternatively, the method of the second aspect of the invention relates to a method for determining the effectiveness of a treatment of a subject suffering from IBD with an anti-TNFalpha compound based on the expression levels of two or more genes, wherein the expression levels of the three or more genes are selected from one or more groups,
[0151] wherein if the IBD is UC, the genes are selected from group 3 or group 6,
[0152] wherein if the IBD is CD, the genes are selected from group 2 or group 3,
[0153] wherein group 2 consist of the genes: BCL2L1, BIRC3, CCL2, CCL22, CCL3, CCL4, CCL5, CX3CL1, CXCL1, CXCL2, CXCL3, ICAM1, IL1B, IL6, IL8, IRF1, MMP9, NFKB2, NFKBIA, NFKBIE, PTGS2, SELE, STAT5A, TNF, TNFAIP2, TRAF1, VCAM1;
[0154] wherein group 3 consist of the genes: BCL2L11, DNMT1, ENPP2, GLRX, MMP1, MMP3, MMP9, PLAU, PLAUR, PTGS2, SERPINE1, TIMP1, VIM;
[0155] wherein group 6 consist of the genes: CDKN1A, EAF2, ELL2, FKBP5, LCP1, PLAU, PMEPA1, PRKACB, SGK1, TMPRSS2,
[0156] wherein the two or more expression levels are used to determine whether the treatment of IBD in the patient with an anti-TNFalpha compound is effective or not effective,
[0157] wherein a decreased expression level of BCL2L11 or PRKACB or an increased expression level of any of the other genes corresponds to a not effective treatment, and
[0158] wherein an increased expression level of BCL2L11 or PRKACB or a decreased expression level of any of the other genes corresponds to an effective treatment. Preferably group 2 consist of the genes: BCL2L1, BIRC3, CCL2, CCL22, CCL3, CCL4, CCL5, CX3CL1, CXCL1, CXCL2, CXCL3, ICAM1, IL1B, IL6, IL8, IRF1, MMP9, NFKB2, NFKBIA, NFKBIE, PTGS2, SELE, STAT5A, TNF, TNFAIP2, TRAF1, VCAM1. Preferably group 3 consist of the genes: GLRX, MMP1, MMP3, MMP9, PLAU, PLAUR, PTGS2, SERPINE1, TIMP1, VIM. Preferably group 6 consist of the genes: EAF2, ELL2, FKBP5, LCP1, PLAU, PMEPA1, TMPRSS2.

[0159] The conditions for selecting target genes (T value) and number of genes (N values) were further varied to evaluate the conditions that allow for accurate prediction of treatment or treatment effectiveness. These results are set out in Table 15 below. For each condition resulting in 90% or more of the 1000 random selections of N genes having a significant differentiation between responders and non-responders, the representative gene set are listed below in LIST A. Therefore, in an embodiment, the invention relates to a method for determining the effectiveness of a treatment of a subject suffering from IBD with an anti-TNFalpha compound based on the expression levels of N or more, for example one, two, three, four, five, six, seven eight, nine, ten, eleven or twelve or more, genes selected from a group as listed in LIST A below wherein the application is listed as effectiveness and N is indicated in LIST A for the respective set, and
[0160] wherein if the IBD is UC, the N or more, e.g. one, two, three, four, five, six, seven, eight, nine, ten, eleven, twelve or more, genes are selected from the group indicated is UC; or
[0161] wherein the IBD is CD, the N or more, e.g. one, two, three, four, five, six, seven, eight, nine, ten, eleven, twelve or more, genes are selected from the indicated is CD; and
[0162] wherein the N or more expression levels are used to determine whether the treatment of IBD in the patient with an anti-TNFalpha compound is effective or not effective,
[0163] wherein a decreased expression level of BCL2L11 or PRKACB or an increased expression level of any of the other genes corresponds to a not effective treatment, and
[0164] wherein an increased expression level of BCL2L11 or PRKACB or a decreased expression level of any of the other genes corresponds to an effective treatment.

[0165] Alternatively, the method of the second aspect of the invention relates to a method for determining the effectiveness of a treatment of a subject suffering from IBD with an anti-TNFalpha compound based on inferred cellular signaling pathway activity or activities in a sample obtained from the subject, the method comprising:
[0166] comparing the inferred cellular signaling pathway activity, or when multiple cellular signaling pathway activities are used the combined cellular signaling pathway activities, with a threshold value;
[0167] wherein if the IBD is UC, the cellular signaling pathway is AR and/or MAPK-AP1,
[0168] wherein if the IBD is CD, the cellular signaling pathway is MAPK-AP1 and/or NFkB,
[0169] wherein the cellular signaling pathway activity or activities are inferred by
[0170] determining an activity level of a transcription factor (TF) element of the respective cellular signaling pathway in the sample obtained from the subject, the TF element controlling transcription of three or more target genes of the respective cellular signaling pathway, the determining being based on evaluating a calibrated mathematical pathway model relating the expression levels of the three or more target genes of the respective cellular signaling pathway to the activity level of the TF element of the cellular signaling pathway, and
[0171] inferring the activity of the cellular signaling pathway in the subject based on the determined activity level of the TF element of the respective cellular signaling pathway in the sample of the subject;
[0172] wherein the treatment is considered to be successful when the inferred cellular signaling pathway activity or the combined cellular signaling pathway activities are below the threshold value, and wherein the treatment is considered to be unsuccessful when the inferred cellular signaling pathway activity or the combined cellular signaling pathway activities are above the threshold value. In an embodiment, the threshold value is independently determined in one or more reference samples. In an embodiment the three or more, e.g. three, four, five, six, seven, eight, nine, ten, eleven or twelve or more, target genes of the AR cellular signaling pathway are selected from KLK2, PMEPA1, TMPRSS2, NKX3-1, ABCC4, KLK3, FKBP5, ELL2, UGT2B15, DHCR24, PPAP2A, NDRG1, LRIG1, CREB3L4, LCP1, GUCY1A3, AR and EAF2, optionally further at least one target gene, e.g. one, two, three, four, five, six, seven, eight, nine, ten eleven twelve or more target gene(s) selected from the group comprising or consisting of: APP, NTS, PLAU, CDKN1A, DRG1, FGF8, IGF1, PRKACB, PTPN1, SGK1 and TACC2; the three or more, e.g. three, four, five, six, seven, eight, nine, ten, eleven or twelve or more, target genes of the MAPK-AP1 cellular signaling pathway are selected from BCL2L11, CCND1, DDIT3, DNMT1, EGFR, ENPP2, EZR, FASLG, FIGF, GLRX, IL2, IVL, LOR, MMP1, MMP3, MMP9, SERPINE1, PLAU, PLAUR, PTGS2, SNCG, TIMP1, TP53, and VIM, preferably, from the group consisting of: CCND1, EGFR, EZR, GLRX, MMP1, MMP3, PLAU, PLAUR, SERPINE1, SNCG, and TIMP1; the three or more, e.g. three, four, five, six, seven, eight, nine, ten, eleven or twelve or more, target genes of the NFkB cellular signaling pathway are selected from BCL2L1, BIRC3, CCL2, CCL3, CCL4, CCL5, CCL20, CCL22, CX3CL1, CXCL1, CXCL2, CXCL3, ICAM1, IL1B, IL6, IL8, IRF1, MMP9, NFKB2, NFKBIA, NFKB IE, PTGS2, SELE, STAT5A, TNF, TNFAIP2, TNIP1, TRAF1, and VCAM1.

[0173] In an embodiment the method according the first or the second aspect of the invention, the sample obtained from the subject is a gastric, colon, intestinal or rectal sample. The sample may for example be a gastric, colon, intestinal or rectal biopsy.

[0174] In an embodiment according the first or the second aspect of the invention, the method further includes determining the expression levels of the target genes based on mRNA extracted from the sample obtained from the subject, preferably wherein the method further includes extracting the mRNA from the sample obtained from the subject.

[0175] In an embodiment the method according the first or the second aspect of the invention, the threshold value is independently determined in from one or more reference samples.

[0176] It is further envisioned that the method according to the first aspect of the invention can be used in successful stratification of IBD patients (both UC and CD), to predict response to treatment with an anti-TNFalpha compound. Therefore treatment with an anti-TNFalpha compound in an IBD patient is preferably combined with the method as described herein, and the anti-TNFalpha compound is only administered when it is established that the treatment prediction is favorable.

[0177] Therefore, in a third aspect the invention relates to an anti-TNFalpha compound for use of in the treatment of IBD in a subject, wherein the use comprises: performing the method as defined in the first or the second aspect of the invention to determine the treatment response of the subject to anti-TNFalpha treatment, and administering the anti-TNFalpha compound of the treatment response to anti-TNFalpha treatment is found to be favorable for the subject. Alternatively, in a third aspect the invention relates to a method of treatment of a subject having IBD by administering an anti-TNFalpha compound, the method comprising performing the method as defined in the first or the second aspect of the invention to determine the treatment response of the subject to anti-TNFalpha treatment, and administering the anti-TNFalpha compound of the treatment response to anti-TNFalpha treatment is found to be favorable for the subject.

[0178] In an embodiment the IBD is UC or CD.

[0179] In an embodiment the anti-TNFalpha compound is selected from the group consisting of antibody based compounds such as Adalimumab, Certolizumab, Etanercept, Golimumab, Infliximab, or a biosimilars or chimeric products of any of the preceding compounds, such as for example the CT-P13 Infliximab biosimilar, or small molecule based compound such as thalidomide, lenalidomide, pomalidomide, a xanthane derivative such as pentoxifylline, bupropion, an 5-HT₂A agonist such as (R)DOI, TCB2, LSD and LA-SS-Az; or a natural compound such as curcumin, catechins, cannabidiol or Echinacea purpurea. An anti TNFalpha compound may be an antibody, a small molecule or a short nucleotide type inhibitor. Other TNFalpha inhibiting compounds may be known to the skilled person, therefore the above list should not be construed as limiting the invention. An antiTNFalpha compound may also be a short nucleotide such as an RNAi, miRNA, siRNA or short nucleotide analogue such as 2′-O-methyl-substituted RNA, locked nucleic acid (LNA) or bridged nucleic acid (BNA), morpholino, or peptide nucleic acid (PNA), targeting a component of the TNFalpha signaling pathway.

[0180] In a fourth aspect the invention relates to a kit of parts comprising primers and probes for the detection of the expression levels of three or more target genes, wherein the expression levels of the three or more genes are selected from:
[0181] the group consisting of ANGPTL4, BCL2L1, BCL2L11, BIRC3, CCL2, CCL22, CCL3, CCL4, CCL5, CCND1, CD274, CD44, CDKN2B, COL18A1, CTGF, CX3CL1, CXCL1, CXCL2, CXCL3, DKK1, DNMT1, ENPP2, FGF2, FOS, FSCN1, GADD45B, GLRX, HIF1A, HMGA2, HNF1A, HSP90AB1, HSP90B1, ICAM1, IFNG, IL11, IL10, IL1B, IL6, IL8, IRF1, INPP5D, JUNB, KIAA1199, LEF1, MCL1, MMP1, MMP2, MMP3, MMP9, MYC, NFKB2, NFKBIA, NFKBIE, NOS2, OVOL1, PDGFB, PLAU, PLAUR, PTGS2, PTHLH, SAA1, SELE, SERPINE1, SKIL, SMAD4, SNAI2, STAT1, STAT5A, TBX3, TCF7L2, TIMP1, TNF, TNFAIP2, TNFRSF1B, TRAF1, TWIST1, VCAM1, VEGFA, VIM, and ZEB1; or
[0182] the group consisting of BCL2L11, CDKN1A, DNMT1, EAF2, ELL2, ENPP2, FKBP5, GLRX, LCP1, MMP1, MMP3, MMP9, PLAU, PLAUR, PMEPA1, PRKACB, PTGS2, SERPINE1, SGK1, TIMP1, TMPRSS2 and VIM; or
[0183] the group consisting of BCL2L1, BCL2L11, BIRC3, CCL2, CCL22, CCL3, CCL4, CCL5, CX3CL1, CXCL1, CXCL2, CXCL3, DNMT1, ENPP2, GLRX, ICAM1, IL1B, IL6, IL8, IRF1, MMP1, MMP3, MMP9, NFKB2, NFKBIA, NFKBIE, PLAU, PLAUR, PTGS2, SELE, SERPINE1, STAT5A, TIMP1, TNF, TNFAIP2, TRAF1, VCAM1 and VIM.

[0184] Such kit may be advantageously used in the methods and uses described herein. Therefore, in a fifth aspect the invention relates to a use of the kit according to the fourth aspect in the method of the first or the second or the third aspect of the invention. Methods for designing primers and probes for the quantitative detection of expression levels are well known in the art. For example qPCR can be used. The genes named here are listed under their default name. Their sequences can be retrieved from a public database such NCBI genes or genome browsers such as Ensembl or the UCSC genome browser. The kit may additionally comprise buffers and/or enzymes and/or other reagents which can be used in the detection, such as dNTP, MgCl₂ solution, Reverse Transcriptase and/or polymerase.

[0185] In the claims, the word “comprising” does not exclude other elements or steps, and the indefinite article “a” or “an” does not exclude a plurality. The mere fact that certain measures are recited in mutually different dependent claims does not indicate that a combination of these measured cannot be used to advantage. Any reference signs in the claims should not be construed as limiting the scope thereof.

### BRIEF DESCRIPTION OF THE DRAWINGS

[0186] General: In all the figures where signal transduction pathway analysis scores are depicted, these are given as log 2odds scores for pathway activity, derived from the probability scores for pathway activity provided by the Bayesian pathway model analysis. Log 2odds scores indicate the level of activity of a signaling pathway on a linear scale.

[0187] Analyzed public datasets are indicated with their GSE number (in the figure legend of each figure).

[0188] All validation samples for a signaling pathway model or an immune response/system model are independent samples and have not been used for calibration of the respective model to be validated.

[0189] FIGS. 1 to 4. Pathway activity scores of dataset GSE12251 including UC patients with responded (yes) or not responded (no) to anti TNFalpha treatment. Pathway activity score on Y-axis in log 2odds. Two sided Mann-Whitney-Wilcoxon statistical tests were performed; p-values are indicated in the figures. P-values indicate: *p<0.05; **p<0.01; ***p<0.001. Depicted are cellular signaling pathway activity scores using a model based on the full gene set (standard) or using a random selection of three genes (3 gene a model; 3 gene b model). FIG. 1 shows pathway scores for the MAPK-AP1 and AR pathways. FIG. 2 shows pathway scores for the NFkB and STAT1/2 INF I pathways. FIG. 3 shows pathway scores for the STAT1/2 INF II and STAT3 pathways. FIG. 4 shows pathway scores for the TGFbeta and WNT pathways.

[0190] FIGS. 5 to 12. Pathway analysis of dataset GSE16879 containing mucosal biopsies were obtained at endoscopy in actively inflamed mucosa from IBD patients (UC) before and 4-6 weeks after their first infliximab infusion (TNF-alpha blocker) and in normal mucosa from control patients. Pathway activity score on Y-axis in log 2odds. Two sided Mann-Whitney-Wilcoxon statistical tests were performed; p-values are indicated in the figures. P-values indicate: *p<0.05; **p<0.01; ***p<0.001. Depicted are cellular signaling pathway activity scores using a model based on the full gene set (standard) or using a random selection of three genes (3 gene a model; 3 gene b model). FIG. 5 shows pathway scores for the AR pathway. FIG. 6 shows pathway scores for the MAPK-AP1 pathway. FIG. 7 shows pathway scores for the NFkB pathway. FIG. 8 shows pathway scores for the STAT1/2 INF I pathway. FIG. 9 shows pathway scores for the STAT1/2 INF II pathway. FIG. 10 shows pathway scores for the STAT3 pathway. FIG. 11 shows pathway scores for the TGFbeta pathway. FIG. 12 shows pathway scores for the WNT pathway.

[0191] FIGS. 13 to 20. Pathway analysis of dataset GSE16879 including actively inflamed mucosa from CD patients, before and 4-6 weeks after their first anti-TNFalpha treatment and in normal mucosa from control patients. Most important pathways include for response prediction; AP1, TGFBeta, WNT, NFkB, STAT3, for treatment effectiveness the NFKB and AP1. P-values and legends are included in the figure. Pathway activity score on Y-axis in log 2odds. Two sided Mann-Whitney-Wilcoxon statistical tests were performed; p-values are indicated in the figures. P-values indicate: *p<0.05; **p<0.01; ***p<0.001. Depicted are cellular signaling pathway activity scores using a model based on the full gene set (standard) or using a random selection of three genes (3 gene a model; 3 gene b model). FIG. 13 shows pathway scores for the AR pathway. FIG. 14 shows pathway scores for the MAPK-AP1 pathway. FIG. 15 shows pathway scores for the NFkB pathway. FIG. 16 shows pathway scores for the STAT1/2 INF I pathway. FIG. 17 shows pathway scores for the STAT1/2 INF II pathway. FIG. 18 shows pathway scores for the STAT3 pathway. FIG. 19 shows pathway scores for the TGFbeta pathway. FIG. 20 shows pathway scores for the WNT pathway.

[0192] FIGS. 21 to 29. Pathway analysis of dataset GSE23597 containing mucosal biopsy samples from UC patients before treatment with placebo, 5 or 10 mg/kg infliximab, and at 8 and 30 weeks after treatment. Pathway activity score on Y-axis in log 2odds. Two sided Mann-Whitney-Wilcoxon statistical tests were performed; p-values are indicated in the figures. P-values indicate: *p<0.05; **p<0.01; ***p<0.001. Depicted are cellular signaling pathway activity scores using a model based on the full gene set (standard) or using a random selection of three genes (3 gene a model; 3 gene b model). FIG. 21 shows the figure legend for FIG. 22 to 29. FIG. 22 shows pathway scores for the AR pathway. FIG. 23 shows pathway scores for the MAPK-AP1 pathway. FIG. 24 shows pathway scores for the NFkB pathway. FIG. 25 shows pathway scores for the STAT1/2 INF I pathway. FIG. 26 shows pathway scores for the STAT1/2 INF II pathway. FIG. 27 shows pathway scores for the STAT3 pathway. FIG. 28 shows pathway scores for the TGFbeta pathway. FIG. 29 shows pathway scores for the WNT pathway.

[0193] FIG. 30 to 37. Pathway analysis of dataset GSE52746 which contains colonic samples from Crohn's disease patients and healthy colonic samples from non-inflammatory controls. Crohn's disease patients includes active CD with anti-TNF therapy (non-responders) and inactive CD with anti-TNF therapy (responders). Pathway activity score on Y-axis in log 2odds. Mann-Whitney-Wilcoxon statistical test were performed; p-values are indicated in the figures. P-values indicate: *p<0.05; **p<0.01; ***p<0.001. Depicted are cellular signaling pathway activity scores using a model based on the full gene set (standard) or using a random selection of three genes (3 gene a model; 3 gene b model). FIG. 30 shows pathway scores for the AR pathway. FIG. 31 shows pathway scores for the MAPK-AP1 pathway. FIG. 32 shows pathway scores for the NFkB pathway. FIG. 33 shows pathway scores for the STAT1/2 INF I pathway. FIG. 34 shows pathway scores for the STAT1/2 INF II pathway. FIG. 35 shows pathway scores for the STAT3 pathway. FIG. 36 shows pathway scores for the TGFbeta pathway. FIG. 37 shows pathway scores for the WNT pathway.

[0194] FIGS. 38 to 45. For each prediction (treatment effectiveness and treatment prediction) the pathways that are significantly different in activity between groups were identified for UC and CD patients. For each pathway a sub-selection was made on the target genes, identifying those pathway target genes that most contributed to the pathway score in the present applications, the correlation of pathway activity and gene expression levels based on a threshold T. The curates target genes of the predictive pathways were pooled per application. Next 1000 random selections were made of either 3 or 6 (N=3 or N=6) of the pooled curated target genes based on either threshold T=0.4 or T=0.5. The linear classifier was applied on the samples from the two sample groups to be distinguished, and perform a Wilcox Rank Sum test, resulting in a p-value for each point, which are plotted in FIGS. 38-45. FIG. 38 depicts CD and UC effectiveness plots for T=0.4 and N=3. FIG. 39 depicts CD and UC prediction plots for T=0.4 and N=3. FIG. 40 depicts CD and UC effectiveness plots for T=0.4 and N=6. FIG. 41 depicts CD and UC prediction plots for T=0.4 and N=6. FIG. 42 depicts CD and UC effectiveness plots for T=0.5 and N=3. FIG. 43 depicts CD and UC prediction plots for T=0.5 and N=3. FIG. 44 depicts CD and UC effectiveness plots for T=0.5 and N=6. FIG. 45 depicts CD and UC prediction plots for T=0.5 and N=6.

### EXAMPLES

[0195] We used the pathway analysis to define for IBD a characteristic profile of signal transduction pathway activities (AR, ER, PR, GR, HH, Notch, TGFBeta, WNT, JAK-STAT1/2, JAK-STAT3, NFkB, PI3K, MAPK).

### IBD Dataset: GSE16879

[0196] Mucosal biopsies were obtained at endoscopy in actively inflamed mucosa from 61 IBD patients (24 ulcerative colitis (UC), 19 Crohn's colitis (CDc) and 18 Crohn's ileitis (CDi)), before and 4-6 weeks after their first infliximab infusion (TNF-alpha blocker) and in normal mucosa from 12 control patients.

[0197] Using the pathway analysis approach, we defined a specific pathway activity profile for UC and CD from a mucosal biopsy which enables the prediction of anti TNFalpha drugs treatment response after diagnosis and monitoring of the treatment response.

[0198] Subsequently, based on the definition of a specific pathway activity profile for responders to TNFalpha blockers, we developed a few example computational models which can interpret the signaling pathway activity profile from an individual patient tissue or cell sample with respect to the likelihood that the patient will respond to the treatment of anti TNFalpha drugs.

### UC

[0199] FIGS. 5 to 12 show the pathways scores of the signaling pathways, which are involved in response prediction, treatment effectiveness and response monitoring of UC. Each case will be described separately below.

### Response Prediction to Anti TNF-Alpha Treatment (FIGS. 5-12)

[0200] In UC, the pathway activity before treatment with the anti-TNFalpha were significantly different between responders and non-responders for NFKB, TGFBeta and STAT3, using a two-sided Mann Whitney Wilcoxon test; see FIGS. 5 to 12 for p-values and Table 2 for p-values, u-stats and AUC.

[0201] There are multiple ways to create computational models for clinical decision support (CDS), based on the pathways' scores. Below 5 examples are provided. Pathway activity scores are given on a log 2 odds scale.
[0202] 1. Use the cluster centroids (see Table 1), and determine for a test sample the distance to each of them (d1 and d2), deciding that the tissue samples is fitting the response cluster with the centroid at closest distance, e.g. response (i.e. d1<d2), no response (i.e. d2<d1).
[0203] 2. Calculate the distance to each of the two centroids (d1 and d2), and assign a probability of no response as d2/(d1+d2), and a corresponding probability of response as d1/(d1+d2).
[0204] 3. Calculate the sum of pathway scores, and assign a sample to response if it is equal or above the corresponding threshold, and to no response if below (Table 2)
[0205] 4. Calculate the sum of pathway scores, and assign a sample to response (define response probability 1) if the sum equals that of centroid C1 or higher, and to no response (define response probability 0) if the sum equals that of centroid C2 or lower, and a linear interpolation if in between (giving response probability between 0 and 1).
[0206] 5. Similar to 4, but first determining a response probability (points) for each pathway separately, and then adding up. The maximum sum of 4 is obtained if the test sample has all four pathway scores below those of centroid C1, indicating maximum probability of response; the minimum sum of 0 is obtained if the test sample has all four pathway scores above those of centroid C2, indicating minimum probability of response.

[0207] More sophisticated classifiers can be built by somebody skilled in the art of machine learning, by using e.g. Bayesian classification, support vector machines or neural nets.

TABLE 1
Centroids (Kmeans), delta and threshold based on log2odds values.

| | Pathway | Centroid C1 | | |
|---|---|---|---|---|
| | (Response: | (Response: | Centroid | Threshold: |
| | Yes) | No) | C2 delta | (mean of centroids) |
| HH | −15.1 | −16.4 | 0.65 | −15.4 |
| NFKB | 9.2 | −5.4 | 14.6 | 1.9 |
| TGFbeta | −8.0 | −12.3 | 4.3 | −10.15 |
| STAT3 | −6.1 | −9.2 | 3.1 | −7.65 |
| Sum | −20 | −43.3 | 23.3 | −31.65 |

### UC Response Monitoring

[0208] For monitoring the effect of anti-TNFalpha treatment, we compared the pathway activity scores before and after treatment, for responders as well as non-responders. Pathways scores which were significant lower after treatment are given in table 1 both for responders, and for non-responders; for pathway figures see FIG. 3.

[0209] AR, AP1, NFKB and STAT3 pathways were significant lower after anti-TNFalpha treatment in responders and non-responders; see FIGS. 5 to 12 for p-values and Table 3 for p-values, u-stats and AUC.

### Treatment Effectiveness

[0210] To determine if a patient was a responder or a non-responder/resistance against the treatment we used a combination of significant pathways, see table 4 for p-values, u-stats and AUC.

### Dataset GSE12251 Anti TNF-Alpha Treatment UC Responders and Non-Responders (FIGS. 1-4)

[0211] Background information about dataset GSE12251: Twenty-two patients underwent colonoscopy with biopsy before infliximab treatment. Response to infliximab was defined as endoscopic and histologic healing at week 8.

[0212] For the response prediction of anti TNF-alpha for UC patients based on pathway signaling we first analyzed pre-treatment pathway activity between the responders and non responders. See FIGS. 1 to 4 for the pathway analysis and Table 5 for the P-values, U-stats and AUC. The significant pathways included TGFbeta, WNT, NFKB, STAT3 and STAT1-2.

### Dataset GSE14580: Anti TNF-Alpha Treatment UC Responders and Non-Responders—Response Prediction (Data not Shown)

[0213] Information about samples in dataset: Patients with active UC, refractory to corticosteroids and/or immunosuppression, underwent colonoscopy with biopsies from diseased colon within a week prior to the first intravenous infusion of 5 mg infliximab per kg body weight. Response to infliximab was defined as endoscopic and histologic healing at 4-6 weeks after first infliximab treatment.

[0214] For response prediction of anti TNF-alpha for UC patients based on pathway signaling we analyzed the pathway activity between the groups. Significant pathway models were selected using a Mann-Whitney-Wilcoxon statistical tests. Table 6 shows the p-values, U-stats and AUC. The significant pathways include TGFBeta, NFKB and STAT3.

### UC Responders and Non-Responders Before and After Treatment (GSE23597) (FIGS. 21-29)

[0215] Information about samples: Biopsies were obtained from UC patients before treatment with placebo, 5 or 10 mg/kg infliximab (anti-TNFalpha), and at 8 and 30 weeks after treatment.

[0216] We analyzed the signaling pathway models for the different groups before and after anti TNF-alpha treatment or placebo. The pathway analysis is shown in FIGS. 21 to 29. P-values, U-stats and AUC are shown in Tables 7-9.

[0217] For response prediction, no large differences were detected before treatment between the responders and non responders (see Table 7 for p-values, u-stats and AUC).

[0218] However, for monitoring the pathways Ap1, AR, NFKB, TGFBeta, STAT1-2 and STAT3 becomes lower after treatment in the responders with the lowest pathway activity scores after 30 weeks compared before start of treatment. Furthermore, the responders after 30 week which received 10 mg dose showed a larger decrease in pathway activity for AR, AP1, NFKB, STAT1-2 and STAT3 than the patients who received 5 mg/kg anti-TNF-alpha treatment.

[0219] For measuring the treatment effectiveness responders and non responder after treatment were compared. See table 8 for p-values. Patients who received and responded to 5 mg/kg anti-TNA-alpha showed a significant decrease in the NFKB pathway only after 30 weeks of treatment. Whereas the 10 mg/kg group already had significant differences after 8 weeks compared to the non-responders. Furthermore, in the 10 mg/kg responder group also the AP1 and STAT3 pathways (besides the NFKB) became significant different after 30 weeks of treatment compared to the non-responders.

### Crohn Disease

### CD GSE16879 (FIGS. 13-20)

[0220] Mucosal biopsies were obtained at endoscopy in actively inflamed mucosa from IBD patients Crohn's colitis (CDc) and Crohn's ileitis (CDi)), before and 4-6 weeks after their first infliximab infusion and in normal mucosa from control patients.

[0221] For response prediction, treatment effectiveness and response monitoring of CD we analyzed the pathway activity scores. FIGS. 13 to 20 show the pathways scores of the signaling pathways which are involved in response prediction, treatment effectiveness and response monitoring of CD.
[0222] For response prediction the following pathways were significantly different between the responders and non-responders before treatment; AP1, TGFBeta, WNT, NFkB, STAT3_blood.
[0223] For response monitoring AP1, NFKB, TGFbeta, STAT3blood and WNT
[0224] and for treatment effectiveness the NFKB and AP1.
   We used the Mann-Whitney-Wilcoxon statistical test on CD patients to determine which pathways were significantly different between the responders and non-responders to anti-TNFalpha treatment. See Table 10 for p-values, U-stats and AUC.

### Monitoring of Treatment Response in CD Patients

[0225] To monitor the effect of the treatment, we compared the pathways before and after treatment. See table 11 for the P-values, U-stats and AUC. The AP1 and NFKB pathways were significantly between the responders before and after treatment.

### Effectiveness of Treatment

[0226] To determine the effectiveness of the anti-TNF-alpha treatment we compared the responder and non responders towards treatment and used the significant pathways NFKB, AP1, WNT and STAT3 pathways, see Table 12 for p-values, U-stats and AUC.

### Dataset GSE52746 Active and Non-Active CD and Anti-TNFalpha Treatment (Data not Shown)

[0227] Dataset GSE52746 contains data from colonic biopsy samples from Crohn's disease patients and healthy colonic samples from non-inflammatory controls. From the Crohn's disease patients there were 5 non-responders (active CD patients) and 7 responders (inactive CD patients) after anti-TNF therapy. Using the pathway analysis we compared the different groups in the dataset (Table 13).

### Monitoring:

[0228] For monitoring we compared the Active CD patients without anti-TNF alpha treatment, which probably consist of potential non responders and responders to anti-TNFalpha treatment, and compared these with the responders after treatment (inactive CD patients). The pathways NFKB, TGFbeta, AP1, STAT3 and WNT were significant lower after treatment compared to the group without treatment. See table 14 for the p-values and U-stats of the Mann-Whitney-Wilcoxon statistical test and for AUCs.

### Effectiveness:

[0229] For the effectiveness we compared the responders and non-responders after anti-TNF alpha treatment. The p values of the Mann-Whitney-Wilcoxon statistical test can be found in Table 15. Only AR and WNT were significant different between the groups.

### 3 Gene Models

[0230] In order to test if a subset of genes can be used for the pathway models, for each pathway two randomly selected sub-sets of three target genes (a model and b model respectively) were selected as follows:

| Pathway | a model genes | b model genes |
|---|---|---|
| AR | ABCC4; KLK2; PMEPA1 | KLK3; NKX3-1; TMPRSS2 |
| MAPK-AP1 | BCL2L11; EZR; GLRX | MMP1; MMP3; PLAU |
| NFkB | CCL4; ICAM1; NFKBIA | CCL3; IL6; TNFAIP2 |
| STAT1/2* | IRF9; PDCD1; SAMM50 | ST13; STAT1; USP18 |
| STAT3 | HSP90B1; ICAM1; JUNB | CD274; MCL1; ZEB1 |
| TGFbeta | GADD45B; IL11; JUNB | ANGPTL4; CTGF; |
| | | SERPINE1 |
| WNT | CD44; DEFA6; KIAA1199 | EPHB3; IL8; KLF6 |

*The STAT1/2 Interferon I and II models use the same target genes but are calibrated on using IFNalpha for the Interferon I model or IFNgamma for the Interferon II model, while using the same unstimulated control.

The standard pathway models use all the genes listed as the primary pathway target lists as described above.

[0231] Pathway activity scores for all datasets using the “a model” and the “b model”, each using three randomly selected target genes are included in FIGS. 1-37. From the figures it can be concluded that using three pathway models, as compared to the “full model” (using all target genes), the same trends can be observed and in most cases three genes suffice to distinguish between groups (e.g. responders vs non-responders).

### Classification Using Gene Subsets Independent of Pathway Models (FIGS. 38-45)

[0232] For CD and UC, we have pathways that correlate with response prediction and with treatment effectiveness. We investigated if we can define gene lists such that with each sub-list of e.g. 3 genes can build a (simple) classifier to do the same.

### Steps:

[0233] take the pathways corresponding to the disease (CD, UC) and application (resp., eff) of interest.
[0234] take their corresponding genes and probesets.
[0235] per gene, take the probeset with maximum absolute correlation with the pathway score it contributes to (across all CD and UC samples; a gene may be involved in multiple pathways).
[0236] select a candidate gene list by taking all genes with their probeset-pathway correlation above a threshold T.
[0237] repeatedly (1000 times) choose a random sub-list of N genes from the candidate gene list.
[0238] make a simple linear classifier with those N genes by assigning them a weight+1 or −1 depending on the sign of their correlation.
[0239] apply that linear classifier on the samples from the two sample groups to be distinguished, and perform a Wilcox Rank Sum test, resulting in a p-value.
[0240] check how many of those 1000 p-values are below 0.05.

[0241] The results are plotted in FIGS. 38 to 45.

[0242] Candidate gene lists for T=0.4

### Prediction (UC or CD):

[0243] TGFB: +ANGPTL4, −CDKN2B, +CTGF, +GADD45B, −HMGA2, +IL11, +INPP5D, +JUNB, +MMP2, +MMP9, −OVOL1, +PDGFB, +PTHLH, +SERPINE1, +SKIL, −SMAD4, +SNAI2, +TIMP1, +VEGFA
[0244] NFKB: +BCL2L1, +BIRC3, +CCL2, +CCL22, +CCL3, +CCL4, +CCL5, +CX3CL1, +CXCL1, +CXCL2, +CXCL3, +ICAM1, +IL1B, +IL6, +IL8, +IRF1, +MMP9, +NFKB2, +NFKBIA, +NFKBIE, +PTGS2, +SELE, +STAT5A, +TNF, +TNFAIP2, +TRAF1, +VCAM1
[0245] AP1: −BCL2L11, +CCND1, +DNMT1, +ENPP2, +GLRX, +MMP1, +MMP3, +MMP9, +PLAU, +PLAUR, +PTGS2, +SERPINE1, +TIMP1, +VIM
[0246] STAT3: +BCL2L1, +CCND1, +CD274, +FGF2, +FOS, +FSCN1, +HIF1A, +HSP90AB1, +HSP90B1, +ICAM1, +IFNG, +IL10, +JUNB, +MCL1, +MMP1, +MMP3, +MMP9, +MYC, +NOS2, +PTGS2, +SAA1, +STAT1, +TIMP1, +TNFRSF1B, +TWIST1, +VIM, +ZEB1
[0247] WNT: +CCND1, +CD44, +COL18A1, +DKK1, -HNF1A, +IL8, +KIAA1199, +LEF1, +MYC, +TBX3, -TCF7L2

[0248] Effectiveness UC:
[0249] AR: +CDKN1A, +EAF2, +ELL2, +FKBP5, +LCP1, +PLAU, +PMEPA1, -PRKACB, +SGK1, +TMPRSS2
[0250] AP1: −BCL2L11, +DNMT1, +ENPP2, +GLRX, +MMP1, +MMP3, +MMP9, +PLAU, +PLAUR, +PTGS2, +SERPINE1, +TIMP1, +VIM

[0251] Effectiveness CD:
[0252] AP1: −BCL2L11, +DNMT1, +ENPP2, +GLRX, +MMP1, +MMP3, +MMP9, +PLAU, +PLAUR, +PTGS2, +SERPINE1, +TIMP1, +VIM
[0253] NFKB: +BCL2L1, +BIRC3, +CCL2, +CCL22, +CCL3, +CCL4, +CCL5, +CX3CL1, +CXCL1, +CXCL2, +CXCL3, +ICAM1, +IL1B, +IL6, +IL8, +IRF1, +MMP9, +NFKB2, +NFKBIA, +NFKBIE, +PTGS2, +SELE, +STAT5A, +TNF, +TNFAIP2, +TRAF1, +VCAM1
[0254] (symbols indicate positive (+) or negative (−) correlation of expression levels and pathway activity)
[0255] Candidate gene lists for T=0.5

### Prediction (UC or CD):

[0256] TGFB: +ANGPTL4, −CDKN2B, +CTGF, +GADD45B, +IL11, +INPP5D, +JUNB, +MMP2, +MMP9, +PTHLH, +SERPINE1, +SNAI2, +TIMP1
[0257] NFKB: +BCL2L1, +BIRC3, +CCL2, +CCL22, +CCL3, +CCL4, +CCL5, +CX3CL1, +CXCL1, +CXCL2, +CXCL3, +ICAM1, +IL1B, +IL6, +IL8, +IRF1, +MMP9, +NFKB2, +NFKBIA, +NFKBIE, +PTGS2, +SELE, +STAT5A, +TNF, +TNFAIP2, +TRAF1, +VCAM1
[0258] AP1: +CCND1, +GLRX, +MMP1, +MMP3, +MMP9, +PLAU, +PLAUR, +PTGS2, +SERPINE1, +TIMP1, +VIM
[0259] STAT3: +BCL2L1, +CCND1, +CD274, +FGF2, +FSCN1, +HIF1A, +HSP90B1, +ICAM1, +IFNG, +JUNB, +MCL1, +MMP1, +MMP3, +MMP9, +PTGS2, +STAT1, +TIMP1, +TNFRSF1B, +TWIST1, +VIM, +ZEB1
[0260] WNT: +CCND1, +CD44, +COL18A1, +DKK1, +IL8, +KIAA1199, +TBX3

### Effectiveness UC:

[0261] AR: +EAF2, +ELL2, +FKBP5, +LCP1, +PLAU, +PMEPA1, +TMPRSS2
[0262] AP1: +GLRX, +MMP1, +MMP3, +MMP9, +PLAU, +PLAUR, +PTGS2, +SERPINE1, +TIMP1, +VIM

[0263] Effectiveness CD:
[0264] AP1: +GLRX, +MMP1, +MMP3, +MMP9, +PLAU, +PLAUR, +PTGS2, +SERPINE1, +TIMP1, +VIM
[0265] NFKB: +BCL2L1, +BIRC3, +CCL2, +CCL22, +CCL3, +CCL4, +CCL5, +CX3CL1, +CXCL1, +CXCL2, +CXCL3, +ICAM1, +IL1B, +IL6, +IL8, +IRF1, +MMP9, +NFKB2, +NFKBIA, +NFKBIE, +PTGS2, +SELE, +STAT5A, +TNF, +TNFAIP2, +TRAF1, +VCAM1
[0266] (symbols indicate positive (+) or negative (−) correlation of expression levels and pathway activity)

[0267] Next it was investigated whether two or even one target gene could be predictive for treatment prediction or treatment effectiveness in UC or CD patients, and if an even lower strictness of gene selection could be used. Therefore, for each UC and CD patient samples (based on dataset GSE16879) the previous experiment was repeated for prediction (treatment prediction) prediction2 (treatment prediction but only target genes from the NFkB or the TGFbeta pathway are selected) or effectiveness (treatment effectiveness) for T=0.3, 0.4 and 0.5 and N=1, 2, 3 or 6. Again, for each condition, N genes were randomly selected 1000 times and it was reviewed how often the random selection of N genes was statistically significant in distinguishing responders and non-responders to anti-TNFalpha treatment. The results are plotted in Table 15, avgp refers to Average P value (of the 1000 random selections of N genes) and sigper refers to the percentage of the 1000 selections that are significant (P lower or equal to 0.05). For each condition that has at least 90 percent significant (meaning at least 900 out of the 1000 random selections of N genes) the corresponding gene sets are listed in list A.

TABLE 2
Treatment prediction UC GSE16879

| | UC_Before first infliximab | | |
|---|---|---|---|
| | treatment_Colon_response_Yes | | |
| | (n = 8) vs. UC_Before first infliximab | | |
| Mann- | treatment_Colon_response_No | | |
| Whitney | (n = 16) | U- | |
| pathway | p-value | value | AUC |
| AR | 2.09E−01 | 43 | 0.66 |
| AP1 | 9.27E−01 | 66 | 0.52 |
| NFKB | 5.33E−03 | 18 | 0.86 |
| TGFB | 5.33E−03 | 18 | 0.86 |
| STAT1-2 I | 5.61E−01 | 74 | 0.58 |
| STAT1-2 II | 7.83E−01 | 59 | 0.54 |
| STAT3 | 1.10E−02 | 22 | 0.83 |
| WNT | 6.18E−02 | 33 | 0.74 |

TABLE 3
Monitoring UC GSE16879

| | UC_Before first infliximab | | |
|---|---|---|---|
| | treatment_Colon_response_Yes | | |
| | (n = 8) VS UC_After first infliximab | | |
| Mann- | treatment_Colon_response_Yes | | |
| Whitney | (n = 8) | U- | |
| pathway | p-value | value | AUC |
| AR | 9.39E−04 | 64 | 1.00 |
| AP1 | 9.39E−04 | 64 | 1.00 |
| NFKB | 5.20E−02 | 51 | 0.80 |
| TGFB | 3.13E−02 | 53 | 0.83 |
| STAT1-2 I | 3.13E−02 | 53 | 0.83 |
| STAT1-2 II | 1.01E−02 | 57 | 0.89 |
| STAT3 | 7.41E−03 | 58 | 0.91 |
| WNT | 7.93E−01 | 35 | 0.55 |

TABLE 4
Effectiveness UC GSE16879

| | UC_After first infliximab | | |
|---|---|---|---|
| | treatment_Colon_response_Yes | | |
| | (n = 8) VS UC_After first infliximab | | |
| Mann- | treatment_Colon_response_No | | |
| Whitney | (n = 16) | U- | |
| pathway | p-value | value | AUC |
| AR | 2.98E−03 | 15 | 0.88 |
| AP1 | 1.05E−03 | 10 | 0.92 |
| NFKB | 2.44E−03 | 14 | 0.89 |
| TGFB | 5.33E−03 | 18 | 0.86 |
| STAT1-2 I | 5.37E−02 | 32 | 0.75 |
| STAT1-2 II | 1.84E−02 | 25 | 0.80 |
| STAT3 | 1.31E−03 | 11 | 0.91 |
| WNT | 1.88E−01 | 42 | 0.67 |

TABLE 5
Treatment prediction UC GSE12251

| | Yes | | |
|---|---|---|---|
| | (responder)(n = 11) | | |
| Mann- | VS No (non | | |
| Whitney | responder)(n = 11) | U- | |
| pathway | p-value | value | AUC |
| AR | 3.25E−01 | 45 | 0.63 |
| AP1 | 1.00E+00 | 61 | 0.50 |
| NFKB | 5.82E−03 | 18 | 0.85 |
| TGFB | 6.39E−04 | 8 | 0.93 |
| STAT1-2 I | 1.26E−02 | 22 | 0.82 |
| STAT1-2 II | 1.81E−02 | 24 | 0.80 |
| STAT3 | 2.03E−03 | 13 | 0.89 |
| WNT | 2.52E−03 | 14 | 0.88 |

TABLE 6
Treatment prediction UC GSE14580

| | UC_Yes | | |
|---|---|---|---|
| | (responder) (n = 8) | | |
| Mann- | VS UC_No (non | | |
| Whitney | responder)(n = 16) | U- | |
| pathway | p-value | value | AUC |
| AR | 2.09E−01 | 43 | 0.66 |
| AP1 | 9.27E−01 | 66 | 0.52 |
| NFKB | 5.33E−03 | 18 | 0.86 |
| TGFB | 5.33E−03 | 18 | 0.86 |
| STAT1-2 I | 5.61E−01 | 74 | 0.58 |
| STAT1-2 II | 7.83E−01 | 59 | 0.54 |
| STAT3 | 1.10E−02 | 22 | 0.83 |
| WNT | 6.18E−02 | 33 | 0.74 |

TABLE 7
Treatment prediction UC GSE23597

| | W0_reponse_No_dose_5 | | | W0_reponse_No_dose_10 | | |
|---|---|---|---|---|---|---|
| | mg/kg (n = 7) VS | | | mg/kg (n = 7) VS | | |
| Mann- | W0_reponse_Yes_dose_5 | | | W0_reponse_Yes_dose_10 | | |
| Whitney | mg/kg (n = 8) | | | mg/kg (n = 10) | | |
| pathway | p-value | U-value | AUC | p-value | U-value | AUC |
| AR | 9.54E−01 | 27 | 0.52 | 4.64E−01 | 27 | 0.61 |
| AP1 | 8.62E−01 | 26 | 0.54 | 6.61E−01 | 40 | 0.57 |
| NFKB | 7.29E−02 | 44 | 0.79 | 8.07E−01 | 32 | 0.54 |
| TGFB | 2.72E−01 | 38 | 0.68 | 2.62E−01 | 47 | 0.67 |
| STAT1-2 I | 7.72E−01 | 25 | 0.55 | 7.33E−01 | 39 | 0.56 |
| STAT1-2 II | 3.25E−01 | 19 | 0.66 | 8.07E−01 | 38 | 0.54 |
| STAT3 | 2.24E−01 | 39 | 0.70 | 9.61E−01 | 36 | 0.51 |
| WNT | 1.83E−01 | 40 | 0.71 | 7.33E−01 | 39 | 0.56 |

TABLE 8
Monitoring UC GSE23597

| | W0_reponse_Yes_dose_5 | | | W0_reponse_Yes_dose_5 | | | W0_reponse_Yes_dose_10 | | |
|---|---|---|---|---|---|---|---|---|---|
| | mg/kg (n = 8) VS | | | mg/kg (n = 8) VS | | | mg/kg (n = 10) VS | | |
| Mann- | W8_reponse_Yes_dose_5 | | | W30_reponse_Yes_dose_5 | | | W8_reponse_Yes_dose_10 | | |
| Whitney | mg/kg (n = 6) | U- | | mg/kg (n = 6) | U- | | mg/kg (n = 7) | U- | |
| pathway | p-value | value | AUC | p-value | value | AUC | p-value | value | AUC |
| AR | 3.33E−01 | 32 | 0.67 | 2.39E−02 | 42 | 0.88 | 0.00 | 67 | 0.96 |
| AP1 | 8.14E−02 | 38 | 0.79 | 3.68E−03 | 47 | 0.98 | 0.01 | 64 | 0.91 |
| NFKB | 3.32E−02 | 41 | 0.85 | 5.51E−03 | 46 | 0.96 | 0.07 | 54 | 0.77 |
| TGFB | 6.12E−02 | 39 | 0.81 | 2.39E−02 | 42 | 0.88 | 0.13 | 51 | 0.73 |
| STAT1-2 I | 2.20E−01 | 34 | 0.71 | 6.12E−02 | 39 | 0.81 | 0.31 | 46 | 0.66 |
| STAT1-2 II | 6.12E−02 | 39 | 0.81 | 2.39E−02 | 42 | 0.88 | 0.22 | 48 | 0.69 |
| STAT3 | 1.07E−01 | 37 | 0.77 | 4.54E−02 | 40 | 0.83 | 0.22 | 48 | 0.69 |
| WNT | 8.14E−02 | 38 | 0.79 | 2.39E−02 | 42 | 0.88 | 0.96 | 35 | 0.50 |

TABLE 9
Effectiveness UC GSE23597

| | W8_reponse_No_dose_5 | | | W30_reponse_No_dose_5 | | | W8_reponse_No_dose_10 | | |
|---|---|---|---|---|---|---|---|---|---|
| | mg/kg (n = 7) VS | | | mg/kg (n = 3) VS | | | mg/kg (n = 7) VS | | |
| Mann- | W8_reponse_Yes_dose_5 | | | W30_reponse_Yes_dose_5 | | | W8_reponse_Yes_dose_10 | | |
| Whitney | mg/kg (n = 6) | U- | | mg/kg (n = 6) | U- | | mg/kg (n = 7) | U- | |
| pathway | p-value | value | AUC | p-value | value | AUC | p-value | value | AUC |
| AR | 3.53E−01 | 28 | 0.67 | 1.56E−01 | 15 | 0.83 | 3.07E−01 | 33 | 0.67 |
| AP1 | 2.25E−01 | 30 | 0.71 | 1.56E−01 | 15 | 0.83 | 2.98E−02 | 42 | 0.86 |
| NFKB | 7.42E−02 | 34 | 0.81 | 2.82E−02 | 18 | 1.00 | 3.07E−01 | 33 | 0.67 |
| TGFB | 1.00E−01 | 33 | 0.79 | 5.28E−02 | 17 | 0.94 | 3.07E−01 | 33 | 0.67 |
| STAT1-2 I | 6.17E−01 | 25 | 0.60 | 5.28E−02 | 17 | 0.94 | 1.00E+00 | 24 | 0.51 |
| STAT1-2 II | 7.21E−01 | 24 | 0.57 | 5.28E−02 | 17 | 0.94 | 7.98E−01 | 27 | 0.55 |
| STAT3 | 1.34E−01 | 32 | 0.76 | 9.33E−02 | 16 | 0.89 | 7.98E−01 | 27 | 0.55 |
| WNT | 1.00E−01 | 33 | 0.79 | 2.82E−02 | 18 | 1.00 | 8.98E−01 | 26 | 0.53 |

TABLE 10
Treatment prediction CD GSE16879

| | CD_Before first infliximab | | |
|---|---|---|---|
| | treatment_Colon_response_No | | |
| | (n = 6) VS CD_Before first infliximab | | |
| Mann- | treatment_Colon_response_Yes | | |
| Whitney | (n = 12) | | |
| pathway | p-value | U-value | AUC |
| AR | 2.06E−01 | 50 | 0.69 |
| AP1 | 3.51E−02 | 59 | 0.82 |
| NFKB | 2.34E−03 | 69 | 0.96 |
| TGFB | 5.73E−03 | 66 | 0.92 |
| STAT1-2 I | 4.26E−01 | 45 | 0.63 |
| STAT1-2 II | 3.25E−01 | 47 | 0.65 |
| STAT3 | 1.00E−02 | 64 | 0.89 |
| WNT | 1.00E−02 | 64 | 0.89 |

TABLE 11
Monitoring CD GSE16879

| | CD_Before first infliximab | | |
|---|---|---|---|
| | treatment_Colon_response_Yes | | |
| | (n = 12) VS CD_After first infliximab | | |
| Mann- | treatment_Colon_response_Yes | | |
| Whitney | (n = 11) | | |
| pathway | p-value | U-value | AUC |
| AR | 7.94E−02 | 95 | 0.72 |
| AP1 | 9.92E−04 | 120 | 0.91 |
| NFKB | 1.20E−04 | 129 | 0.98 |
| TGFB | 2.82E−01 | 84 | 0.64 |
| STAT1-2 I | 3.40E−01 | 82 | 0.62 |
| STAT1-2 II | 1.66E−01 | 89 | 0.67 |
| STAT3 | 3.72E−01 | 81 | 0.61 |
| WNT | 3.72E−01 | 81 | 0.61 |

TABLE 12
Effectiveness CD GSE16879

| | CD_After first infliximab | | |
|---|---|---|---|
| | treatment_Colon_response_No | | |
| | (n = 7) VS CD_After first infliximab | | |
| Mann- | treatment_Colon_response_Yes | | |
| Whitney | (n = 11) | | |
| pathway | p-value | U-value | AUC |
| AR | 5.72E−02 | 60 | 0.78 |
| AP1 | 4.99E−03 | 70 | 6.36 |
| NFKB | 5.78E−04 | 77 | 7.00 |
| TGFB | 1.45E−02 | 66 | 6.00 |
| STAT1-2 I | 2.77E−01 | 51 | 4.64 |
| STAT1-2 II | 1.47E−01 | 55 | 5.00 |
| STAT3 | 2.08E−03 | 73 | 6.64 |
| WNT | 4.63E−02 | 61 | 5.55 |

TABLE 13
Monitoring CD GSE52746

| | active CD patient without | | |
|---|---|---|---|
| | anti-TNF therapy (n = 10) | | |
| | VS inactive CD patient | | |
| | with anti-TNF therapy | | |
| | (n = 7) | | |
| pathway | p-value | U-value | AUC |
| AR | 1.30E−01 | 51 | 0.73 |
| AP1 | 1.68E−02 | 60 | 0.86 |
| NFKB | 2.11E−03 | 67 | 0.96 |
| TGFB | 2.18E−02 | 59 | 0.84 |
| STAT1-2 I | 8.07E−01 | 38 | 0.54 |
| STAT1-2 II | 6.61E−01 | 40 | 0.57 |
| STAT3 | 2.81E−02 | 58 | 0.83 |
| WNT | 2.92E−03 | 66 | 0.94 |

TABLE 14
Effectiveness CD GSE52746

| | active CD patient with anti- | | |
|---|---|---|---|
| | TNF therapy (n = 5) VS inactive | | |
| Mann- | CD patient with anti-TNF | | |
| Whitney | therapy (n = 7) | | |
| pathway | p-value | U-value | AUC |
| AR | 2.30E−02 | 3 | 0.91 |
| AP1 | 3.30E−01 | 11 | 0.69 |
| NFKB | 1.04E−01 | 7 | 0.80 |
| TGFB | 7.45E−01 | 15 | 0.57 |
| STAT1-2 I | 7.45E−01 | 15 | 0.57 |
| STAT1-2 II | 1.94E−01 | 9 | 0.74 |
| STAT3 | 5.16E−01 | 13 | 0.63 |
| WNT | 2.30E−02 | 3 | 0.91 |

TABLE 15

| T | N | disease | application | avgp | sigper |
|---|---|---|---|---|---|
| 0.3 | 1 | UC | prediction | 0.163816 | 48 |
| 0.3 | 1 | UC | prediction2 | 0.15101 | 57 |
| 0.3 | 1 | UC | effectiveness | 0.088594 | 72 |
| 0.3 | 1 | CD | prediction | 0.179574 | 51 |
| 0.3 | 1 | CD | prediction2 | 0.147276 | 54 |
| 0.3 | 1 | CD | effectiveness | 0.049109 | 86 |
| 0.3 | 2 | UC | prediction | 0.10869 | 67 |
| 0.3 | 2 | UC | prediction2 | 0.062496 | 79 |
| 0.3 | 2 | UC | effectiveness | 0.039748 | 88 |
| 0.3 | 2 | CD | prediction | 0.074105 | 74 |
| 0.3 | 2 | CD | prediction2 | 0.039602 | 82 |
| 0.3 | 2 | CD | effectiveness | 0.007279 | 98 |
| 0.3 | 3 | UC | prediction | 0.051243 | 82 |
| 0.3 | 3 | UC | prediction2 | 0.029954 | 87 |
| 0.3 | 3 | UC | effectiveness | 0.017667 | 91 |
| 0.3 | 3 | CD | prediction | 0.035944 | 87 |
| 0.3 | 3 | CD | prediction2 | 0.013289 | 93 |
| 0.3 | 3 | CD | effectiveness | 0.001273 | 100 |
| 0.3 | 6 | UC | prediction | 0.012236 | 96 |
| 0.3 | 6 | UC | prediction2 | 0.005442 | 99 |
| 0.3 | 6 | UC | effectiveness | 0.003728 | 98 |
| 0.3 | 6 | CD | prediction | 0.003404 | 98 |
| 0.3 | 6 | CD | prediction2 | 0.000723 | 100 |
| 0.3 | 6 | CD | effectiveness | 0.000147 | 100 |
| 0.4 | 1 | UC | prediction | 0.143565 | 53 |
| 0.4 | 1 | UC | prediction2 | 0.127825 | 61 |
| 0.4 | 1 | UC | effectiveness | 0.03865 | 81 |
| 0.4 | 1 | CD | prediction | 0.190181 | 55 |
| 0.4 | 1 | CD | prediction2 | 0.129771 | 58 |
| 0.4 | 1 | CD | effectiveness | 0.01583 | 92 |
| 0.4 | 2 | UC | prediction | 0.078552 | 73 |
| 0.4 | 2 | UC | prediction2 | 0.044295 | 82 |
| 0.4 | 2 | UC | effectiveness | 0.005908 | 98 |
| 0.4 | 2 | CD | prediction | 0.066315 | 78 |
| 0.4 | 2 | CD | prediction2 | 0.0372 | 85 |
| 0.4 | 2 | CD | effectiveness | 0.00157 | 100 |
| 0.4 | 3 | UC | prediction | 0.041327 | 87 |
| 0.4 | 3 | UC | prediction2 | 0.018661 | 92 |
| 0.4 | 3 | UC | effectiveness | 0.002044 | 100 |
| 0.4 | 3 | CD | prediction | 0.025349 | 89 |
| 0.4 | 3 | CD | prediction2 | 0.011396 | 94 |
| 0.4 | 3 | CD | effectiveness | 0.000341 | 100 |
| 0.4 | 6 | UC | prediction | 0.009068 | 97 |
| 0.4 | 6 | UC | prediction2 | 0.003979 | 100 |
| 0.4 | 6 | UC | effectiveness | 0.000992 | 100 |
| 0.4 | 6 | CD | prediction | 0.002672 | 99 |
| 0.4 | 6 | CD | prediction2 | 0.000537 | 100 |
| 0.4 | 6 | CD | effectiveness | 0.000129 | 100 |
| 0.5 | 1 | UC | prediction | 0.099554 | 62 |
| 0.5 | 1 | UC | prediction2 | 0.079711 | 72 |
| 0.5 | 1 | UC | effectiveness | 0.033755 | 87 |
| 0.5 | 1 | CD | prediction | 0.108109 | 67 |
| 0.5 | 1 | CD | prediction2 | 0.08967 | 67 |
| 0.5 | 1 | CD | effectiveness | 0.009958 | 94 |
| 0.5 | 2 | UC | prediction | 0.036728 | 85 |
| 0.5 | 2 | UC | prediction2 | 0.026986 | 89 |
| 0.5 | 2 | UC | effectiveness | 0.003925 | 99 |
| 0.5 | 2 | CD | prediction | 0.024161 | 88 |
| 0.5 | 2 | CD | prediction2 | 0.015855 | 92 |
| 0.5 | 2 | CD | effectiveness | 0.000855 | 100 |
| 0.5 | 3 | UC | prediction | 0.023165 | 91 |
| 0.5 | 3 | UC | prediction2 | 0.009574 | 97 |
| 0.5 | 3 | UC | effectiveness | 0.001632 | 100 |
| 0.5 | 3 | CD | prediction | 0.006734 | 96 |
| 0.5 | 3 | CD | prediction2 | 0.005888 | 97 |
| 0.5 | 3 | CD | effectiveness | 0.000321 | 100 |
| 0.5 | 6 | UC | prediction | 0.005007 | 99 |
| 0.5 | 6 | UC | prediction2 | 0.003101 | 100 |
| 0.5 | 6 | UC | effectiveness | 0.000953 | 100 |
| 0.5 | 6 | CD | prediction | 0.000485 | 100 |
| 0.5 | 6 | CD | prediction2 | 0.000281 | 100 |
| 0.5 | 6 | CD | effectiveness | 0.000117 | 100 |

### List A:

[0268] Gene set T=0.3, N=2, CD effectiveness: BCL2L11, DNMT1, ENPP2, EZR, GLRX, MMP1, MMP3, MMP9, PLAU, PLAUR, PTGS2, SERPINE1, TIMP1, VIM, BCL2L1, BIRC3, CCL2, CCL22, CCL3, CCL4, CCL5, CX3CL1, CXCL1, CXCL2, CXCL3, ICAM1, IL1B, IL6, IL8, IRF1, NFKB2, NFKBIA, NFKBIE, SELE, STAT5A, TNF, TNFAIP2, TNIP1, TRAF1, VCAM1
[0269] Gene set T=0.3, N=3, UC effectiveness: CDKNIA, EAF2, ELL2, FKBP5, IGF1, LCP1, LRIG1, PLAU, PMEPA1, PPAP2A, PRKACB, PTPN1, SGK1, TMPRSS2, UGT2B15, BCL2L11, DNMT1, ENPP2, EZR, GLRX, MMP1, MMP3, MMP9, PLAUR, PTGS2, SERPINE1, TIMP1, VIM
[0270] Gene set T=0.3, N=3, CD prediction2: ANGPTL4, CDC42EP3, CDKN2B, CTGF, GADD45B, HMGA2, IL11, INPP5D, JUNB, MMP2, MMP9, OVOL1, PDGFB, PTHLH, SERPINE1, SKIL, SMAD4, SNAI1, SNAI2, TIMP1, VEGFA, BCL2L1, BIRC3, CCL2, CCL22, CCL3, CCL4, CCL5, CX3CL1, CXCL1, CXCL2, CXCL3, ICAM1, IL1B, IL6, IL8, IRF1, NFKB2, NFKBIA, NFKBIE, PTGS2, SELE, STAT5A, TNF, TNFAIP2, TNIP1, TRAF1, VCAM1
[0271] Gene set T=0.3, N=3, CD effectiveness: BCL2L11, DNMT1, ENPP2, EZR, GLRX, MMP1, MMP3, MMP9, PLAU, PLAUR, PTGS2, SERPINE1, TIMP1, VIM, BCL2L1, BIRC3, CCL2, CCL22, CCL3, CCL4, CCL5, CX3CL1, CXCL1, CXCL2, CXCL3, ICAM1, IL1B, IL6, IL8, IRF1, NFKB2, NFKBIA, NFKBIE, SELE, STAT5A, TNF, TNFAIP2, TNIP1, TRAF1, VCAM1
[0272] Gene set T=0.3, N=6, UC prediction: ANGPTL4, CDC42EP3, CDKN2B, CTGF, GADD45B, HMGA2, IL11, INPP5D, JUNB, MMP2, MMP9, OVOL1, PDGFB, PTHLH, SERPINE1, SKIL, SMAD4, SNAI1, SNAI2, TIMP1, VEGFA, BCL2L1, BIRC3, CCL2, CCL22, CCL3, CCL4, CCL5, CX3CL1, CXCL1, CXCL2, CXCL3, ICAM1, IL1B, IL6, IL8, IRF1, NFKB2, NFKBIA, NFKBIE, PTGS2, SELE, STAT5A, TNF, TNFAIP2, TNIP1, TRAF1, VCAM1, BCL2L11, CCND1, DNMT1, ENPP2, EZR, GLRX, MMP1, MMP3, PLAU, PLAUR, VIM, CD274, CRP, FGF2, FOS, FSCN1, HIF1A, HSP90AA1, HSP90AB1, HSP90B1, IFNG, IL10, MCL1, MYC, NOS2, SAA1, STAT1, TNFRSF1B, TWIST1, ZEB1, CD44, COL18A1, DKK1, HNF1A, KIAA1199, LEF1, NKD1, PPARG, SP5, TBX3, TCF7L2
[0273] Gene set T=0.3, N=6, UC prediction2: ANGPTL4, CDC42EP3, CDKN2B, CTGF, GADD45B, HMGA2, IL11, INPP5D, JUNB, MMP2, MMP9, OVOL1, PDGFB, PTHLH, SERPINE1, SKIL, SMAD4, SNAI1, SNAI2, TIMP1, VEGFA, BCL2L1, BIRC3, CCL2, CCL22, CCL3, CCL4, CCL5, CX3CL1, CXCL1, CXCL2, CXCL3, ICAM1, IL1B, IL6, IL8, IRF1, NFKB2, NFKBIA, NFKBIE, PTGS2, SELE, STAT5A, TNF, TNFAIP2, TNIP1, TRAF1, VCAM1
[0274] Gene set T=0.3, N=6, UC effectiveness: CDKNIA, EAF2, ELL2, FKBP5, IGF1, LCP1, LRIG1, PLAU, PMEPA1, PPAP2A, PRKACB, PTPN1, SGK1, TMPRSS2, UGT2B15, BCL2L11, DNMT1, ENPP2, EZR, GLRX, MMP1, MMP3, MMP9, PLAUR, PTGS2, SERPINE1, TIMP1, VIM
[0275] Gene set T=0.3, N=6, CD prediction: ANGPTL4, CDC42EP3, CDKN2B, CTGF, GADD45B, HMGA2, IL11, INPP5D, JUNB, MMP2, MMP9, OVOL1, PDGFB, PTHLH, SERPINE1, SKIL, SMAD4, SNAI1, SNAI2, TIMP1, VEGFA, BCL2L1, BIRC3, CCL2, CCL22, CCL3, CCL4, CCL5, CX3CL1, CXCL1, CXCL2, CXCL3, ICAM1, IL1B, IL6, IL8, IRF1, NFKB2, NFKBIA, NFKBIE, PTGS2, SELE, STAT5A, TNF, TNFAIP2, TNIP1, TRAF1, VCAM1, BCL2L11, CCND1, DNMT1, ENPP2, EZR, GLRX, MMP1, MMP3, PLAU, PLAUR, VIM, CD274, CRP, FGF2, FOS, FSCN1, HIF1A, HSP90AA1, HSP90AB1, HSP90B1, IFNG, IL10, MCL1, MYC, NOS2, SAA1, STAT1, TNFRSF1B, TWIST1, ZEB1, CD44, COL18A1, DKK1, HNF1A, KIAA1199, LEF1, NKD1, PPARG, SP5, TBX3, TCF7L2
[0276] Gene set T=0.3, N=6, CD prediction2: ANGPTL4, CDC42EP3, CDKN2B, CTGF, GADD45B, HMGA2, IL11, INPP5D, JUNB, MMP2, MMP9, OVOL1, PDGFB, PTHLH, SERPINE1, SKIL, SMAD4, SNAIL, SNAI2, TIMP1, VEGFA, BCL2L1, BIRC3, CCL2, CCL22, CCL3, CCL4, CCL5, CX3CL1, CXCL1, CXCL2, CXCL3, ICAM1, IL1B, IL6, IL8, IRF1, NFKB2, NFKBIA, NFKBIE, PTGS2, SELE, STAT5A, TNF, TNFAIP2, TNIP1, TRAF1, VCAM1
[0277] Gene set T=0.3, N=6, CD effectiveness: BCL2L11, DNMT1, ENPP2, EZR, GLRX, MMP1, MMP3, MMP9, PLAU, PLAUR, PTGS2, SERPINE1, TIMP1, VIM, BCL2L1, BIRC3, CCL2, CCL22, CCL3, CCL4, CCL5, CX3CL1, CXCL1, CXCL2, CXCL3, ICAM1, IL1B, IL6, IL8, IRF1, NFKB2, NFKBIA, NFKBIE, SELE, STAT5A, TNF, TNFAIP2, TNIP1, TRAF1, VCAM1
[0278] Gene set T=0.4, N=1, CD effectiveness: BCL2L11, DNMT1, ENPP2, GLRX, MMP1, MMP3, MMP9, PLAU, PLAUR, PTGS2, SERPINE1, TIMP1, VIM, BCL2L1, BIRC3, CCL2, CCL22, CCL3, CCL4, CCL5, CX3CL1, CXCL1, CXCL2, CXCL3, ICAM1, IL1B, IL6, IL8, IRF1, NFKB2, NFKBIA, NFKBIE, SELE, STAT5A, TNF, TNFAIP2, TRAF1, VCAM1
[0279] Gene set T=0.4, N=2, UC effectiveness: CDKNIA, EAF2, ELL2, FKBP5, LCP1, PLAU, PMEPA1, PRKACB, SGK1, TMPRSS2, BCL2L11, DNMT1, ENPP2, GLRX, MMP1, MMP3, MMP9, PLAUR, PTGS2, SERPINE1, TIMP1, VIM
[0280] Gene set T=0.4, N=2, CD effectiveness: BCL2L11, DNMT1, ENPP2, GLRX, MMP1, MMP3, MMP9, PLAU, PLAUR, PTGS2, SERPINE1, TIMP1, VIM, BCL2L1, BIRC3, CCL2, CCL22, CCL3, CCL4, CCL5, CX3CL1, CXCL1, CXCL2, CXCL3, ICAM1, IL1B, IL6, IL8, IRF1, NFKB2, NFKBIA, NFKBIE, SELE, STAT5A, TNF, TNFAIP2, TRAF1, VCAM1
[0281] Gene set T=0.4, N=3, UC prediction2: ANGPTL4, CDKN2B, CTGF, GADD45B, HMGA2, IL11, INPP5D, JUNB, MMP2, MMP9, OVOL1, PDGFB, PTHLH, SERPINE1, SKIL, SMAD4, SNAI2, TIMP1, VEGFA, BCL2L1, BIRC3, CCL2, CCL22, CCL3, CCL4, CCL5, CX3CL1, CXCL1, CXCL2, CXCL3, ICAM1, IL1B, IL6, IL8, IRF1, NFKB2, NFKBIA, NFKBIE, PTGS2, SELE, STAT5A, TNF, TNFAIP2, TRAF1, VCAM1
[0282] Gene set T=0.4, N=3, UC effectiveness: CDKNIA, EAF2, ELL2, FKBP5, LCP1, PLAU, PMEPA1, PRKACB, SGK1, TMPRSS2, BCL2L11, DNMT1, ENPP2, GLRX, MMP1, MMP3, MMP9, PLAUR, PTGS2, SERPINE1, TIMP1, VIM
[0283] Gene set T=0.4, N=3, CD prediction2: ANGPTL4, CDKN2B, CTGF, GADD45B, HMGA2, IL11, INPP5D, JUNB, MMP2, MMP9, OVOL1, PDGFB, PTHLH, SERPINE1, SKIL, SMAD4, SNAI2, TIMP1, VEGFA, BCL2L1, BIRC3, CCL2, CCL22, CCL3, CCL4, CCL5, CX3CL1, CXCL1, CXCL2, CXCL3, ICAM1, IL1B, IL6, IL8, IRF1, NFKB2, NFKBIA, NFKBIE, PTGS2, SELE, STAT5A. TNF. TNFAIP2. TRAF1. VCAM1
[0284] Gene set T=0.4, N=3, CD effectiveness: BCL2L11, DNMT1, ENPP2, GLRX, MMP1, MMP3, MMP9, PLAU, PLAUR, PTGS2, SERPINE1, TIMP1, VIM, BCL2L1, BIRC3, CCL2, CCL22, CCL3, CCL4, CCL5, CX3CL1, CXCL1, CXCL2, CXCL3, ICAM1, IL1B, IL6, IL8, IRF1, NFKB2, NFKBIA, NFKBIE, SELE, STAT5A, TNF, TNFAIP2, TRAF1, VCAM1
[0285] Gene set T=0.4, N=6, UC prediction: ANGPTL4, CDKN2B, CTGF, GADD45B, HMGA2, IL11, INPP5D, JUNB, MMP2, MMP9, OVOL1, PDGFB, PTHLH, SERPINE1, SKIL, SMAD4, SNAI2, TIMP1, VEGFA, BCL2L1, BIRC3, CCL2, CCL22, CCL3, CCL4, CCL5, CX3CL1, CXCL1, CXCL2, CXCL3, ICAM1, IL1B, IL6, IL8, IRF1, NFKB2, NFKBIA, NFKBIE, PTGS2, SELE, STAT5A, TNF, TNFAIP2, TRAF1, VCAM1, BCL2L11, CCND1, DNMT1, ENPP2, GLRX, MMP1, MMP3, PLAU, PLAUR, VIM, CD274, FGF2, FOS, FSCN1, HIF1A, HSP90AB1, HSP90B1, IFNG, IL10, MCL1, MYC, NOS2, SAA1, STAT1, TNFRSF1B, TWIST1, ZEB1, CD44, COL18A1, DKK1, HNF1A, KIAA1199, LEF1, TBX3, TCF7L2
[0286] Gene set T=0.4, N=6, UC prediction2: ANGPTL4, CDKN2B, CTGF, GADD45B, HMGA2, IL11, INPP5D, JUNB, MMP2, MMP9, OVOL1, PDGFB, PTHLH, SERPINE1, SKIL, SMAD4, SNAI2, TIMP1, VEGFA, BCL2L1, BIRC3, CCL2, CCL22, CCL3, CCL4, CCL5, CX3CL1, CXCL1, CXCL2, CXCL3, ICAM1, IL1B, IL6, IL8, IRF1, NFKB2, NFKBIA, NFKBIE, PTGS2, SELE, STAT5A, TNF, TNFAIP2, TRAF1, VCAM1
[0287] Gene set T=0.4, N=6, UC effectiveness: CDKNIA, EAF2, ELL2, FKBP5, LCP1, PLAU, PMEPA1, PRKACB, SGK1, TMPRSS2, BCL2L11, DNMT1, ENPP2, GLRX, MMP1, MMP3, MMP9, PLAUR, PTGS2, SERPINE1, TIMP1, VIM
[0288] Gene set T=0.4, N=6, CD prediction: ANGPTL4, CDKN2B, CTGF, GADD45B, HMGA2, IL11, INPP5D, JUNB, MMP2, MMP9, OVOL1, PDGFB, PTHLH, SERPINE1, SKIL, SMAD4, SNAI2, TIMP1, VEGFA, BCL2L1, BIRC3, CCL2, CCL22, CCL3, CCL4, CCL5, CX3CL1, CXCL1, CXCL2, CXCL3, ICAM1, IL1B, IL6, IL8, IRF1, NFKB2, NFKBIA, NFKBIE, PTGS2, SELE, STAT5A, TNF, TNFAIP2, TRAF1, VCAM1, BCL2L11, CCND1, DNMT1, ENPP2, GLRX, MMP1, MMP3, PLAU, PLAUR, VIM, CD274, FGF2, FOS, FSCN1, HIF1A, HSP90AB1, HSP90B1, IFNG, IL10, MCL1, MYC, NOS2, SAA1, STAT1, TNFRSF1B, TWIST1, ZEB1, CD44, COL18A1, DKK1, HNF1A, KIAA1199, LEF1, TBX3, TCF7L2
[0289] Gene set T=0.4, N=6, CD prediction2: ANGPTL4, CDKN2B, CTGF, GADD45B, HMGA2, IL11, INPP5D, JUNB, MMP2, MMP9, OVOL1, PDGFB, PTHLH, SERPINE1, SKIL, SMAD4, SNAI2, TIMP1, VEGFA, BCL2L1, BIRC3, CCL2, CCL22, CCL3, CCL4, CCL5, CX3CL1, CXCL1, CXCL2, CXCL3, ICAM1, IL1B, IL6, IL8, IRF1, NFKB2, NFKBIA, NFKBIE, PTGS2, SELE, STAT5A, TNF, TNFAIP2, TRAF1, VCAM1
[0290] Gene set T=0.4, N=6, CD effectiveness: BCL2L11, DNMT1, ENPP2, GLRX, MMP1, MMP3, MMP9, PLAU, PLAUR, PTGS2, SERPINE1, TIMP1, VIM, BCL2L1, BIRC3, CCL2, CCL22, CCL3, CCL4, CCL5, CX3CL1, CXCL1, CXCL2, CXCL3, ICAM1, IL1B, IL6, IL8, IRF1, NFKB2, NFKBIA, NFKBIE, SELE, STAT5A, TNF, TNFAIP2, TRAF1, VCAM1
[0291] Gene set T=0.5, N=1, CD effectiveness: GLRX, MMP1, MMP3, MMP9, PLAU, PLAUR, PTGS2, SERPINE1, TIMP1, VIM, BCL2L1, BIRC3, CCL2, CCL22, CCL3, CCL4, CCL5, CX3CL1, CXCL1, CXCL2, CXCL3, ICAM1, IL1B, IL6, IL8, IRF1, NFKB2, NFKBIA, NFKBIE, SELE, STAT5A, TNF, TNFAIP2, TRAF1, VCAM1
[0292] Gene set T=0.5, N=2, UC effectiveness: EAF2, ELL2, FKBP5, LCP1, PLAU, PMEPA1, TMPRSS2, GLRX, MMP1, MMP3, MMP9, PLAUR, PTGS2, SERPINE1, TIMP1, VIM
[0293] Gene set T=0.5, N=2, CD prediction: ANGPTL4, CDKN2B, CTGF, GADD45B, IL11, INPP5D, JUNB, MMP2, MMP9, PTHLH, SERPINE1, SNAI2, TIMP1, BCL2L1, BIRC3, CCL2, CCL22, CCL3, CCL4, CCL5, CX3CL1, CXCL1, CXCL2, CXCL3, ICAM1, IL1B, IL6, IL8, IRF1, NFKB2, NFKBIA, NFKBIE, PTGS2, SELE, STAT5A, TNF, TNFAIP2, TRAF1, VCAM1
[0294] Gene set T=0.5, N=2, CD effectiveness: GLRX, MMP1, MMP3, MMP9, PLAU, PLAUR, PTGS2, SERPINE1, TIMP1, VIM, BCL2L1, BIRC3, CCL2, CCL22, CCL3, CCL4, CCL5, CX3CL1, CXCL1, CXCL2, CXCL3, ICAM1, IL1B, IL6, IL8, IRF1, NFKB2, NFKBIA, NFKBIE, SELE, STAT5A, TNF, TNFAIP2, TRAF1, VCAM1
[0295] Gene set T=0.5, N=3, UC prediction: ANGPTL4, CDKN2B, CTGF, GADD45B, IL11, INPP5D, JUNB, MMP2, MMP9, PTHLH, SERPINE1, SNAI2, TIMP1, BCL2L1, BIRC3, CCL2, CCL22, CCL3, CCL4, CCL5, CX3CL1, CXCL1, CXCL2, CXCL3, ICAM1, IL1B, IL6, IL8, IRF1, NFKB2, NFKBIA, NFKBIE, PTGS2, SELE, STAT5A, TNF, TNFAIP2, TRAF1, VCAM1, CCND1, GLRX, MMP1, MMP3, PLAU, PLAUR, VIM, CD274, FGF2, FSCN1, HIF1A, HSP90B1, IFNG, MCL1, STAT1, TNFRSF1B, TWIST1, ZEB1, CD44, COL18A1, DKK1, KIAA1199, TBX3
[0296] Gene set T=0.5, N=3, UC prediction2: ANGPTL4, CDKN2B, CTGF, GADD45B, IL11, INPP5D, JUNB, MMP2, MMP9, PTHLH, SERPINE1, SNAI2, TIMP1, BCL2L1, BIRC3, CCL2, CCL22, CCL3, CCL4, CCL5, CX3CL1, CXCL1, CXCL2, CXCL3, ICAM1, IL1B, IL6, IL8, IRF1, NFKB2, NFKBIA, NFKBIE, PTGS2, SELE, STAT5A, TNF, TNFAIP2, TRAF1, VCAM1
[0297] Gene set T=0.5, N=3, UC effectiveness: EAF2, ELL2, FKBP5, LCP1, PLAU, PMEPA1, TMPRSS2, GLRX, MMP1, MMP3, MMP9, PLAUR, PTGS2, SERPINE1, TIMP1, VIM
[0298] Gene set T=0.5, N=3, CD prediction: ANGPTL4, CDKN2B, CTGF, GADD45B, IL11, INPP5D, JUNB, MMP2, MMP9, PTHLH, SERPINE1, SNAI2, TIMP1, BCL2L1, BIRC3, CCL2, CCL22, CCL3, CCL4, CCL5, CX3CL1, CXCL1, CXCL2, CXCL3, ICAM1, IL1B, IL6, IL8, IRF1, NFKB2, NFKBIA, NFKBIE, PTGS2, SELE, STAT5A, TNF, TNFAIP2, TRAF1, VCAM1, CCND1, GLRX, MMP1, MMP3, PLAU, PLAUR, VIM, CD274, FGF2, FSCN1, HIF1A, HSP90B1, IFNG, MCL1, STAT1, TNFRSF1B, TWIST1, ZEB1, CD44, COL18A1, DKK1, KIAA1199, TBX3
[0299] Gene set T=0.5, N=3, CD prediction2: ANGPTL4, CDKN2B, CTGF, GADD45B, IL11, INPP5D, JUNB, MMP2, MMP9, PTHLH, SERPINE1, SNAI2, TIMP1, BCL2L1, BIRC3, CCL2, CCL22, CCL3, CCL4, CCL5, CX3CL1, CXCL1, CXCL2, CXCL3, ICAM1, IL1B, IL6, IL8, IRF1, NFKB2, NFKBIA, NFKBIE, PTGS2, SELE, STAT5A, TNF, TNFAIP2, TRAF1, VCAM1
[0300] Gene set T=0.5, N=3, CD effectiveness: GLRX, MMP1, MMP3, MMP9, PLAU, PLAUR, PTGS2, SERPINE1, TIMP1, VIM, BCL2L1, BIRC3, CCL2, CCL22, CCL3, CCL4, CCL5, CX3CL1, CXCL1, CXCL2, CXCL3, ICAM1, IL1B, IL6, IL8, IRF1, NFKB2, NFKBIA, NFKBIE, SELE, STAT5A, TNF, TNFAIP2, TRAF1, VCAM1
[0301] Gene set T=0.5, N=6, UC prediction: ANGPTL4, CDKN2B, CTGF, GADD45B, IL11, INPP5D, JUNB, MMP2, MMP9, PTHLH, SERPINE1, SNAI2, TIMP1, BCL2L1, BIRC3, CCL2, CCL22, CCL3, CCL4, CCL5, CX3CL1, CXCL1, CXCL2, CXCL3, ICAM1, IL1B, IL6, IL8, IRF1, NFKB2, NFKBIA, NFKBIE, PTGS2, SELE, STAT5A, TNF, TNFAIP2, TRAF1, VCAM1, CCND1, GLRX, MMP1, MMP3, PLAU, PLAUR, VIM, CD274, FGF2, FSCN1, HIF1A, HSP90B1, IFNG, MCL1, STAT1, TNFRSF1B, TWIST1, ZEB1, CD44, COL18A1, DKK1, KIAA1199, TBX3
[0302] Gene set T=0.5, N=6, UC prediction2: ANGPTL4, CDKN2B, CTGF, GADD45B, IL11, INPP5D, JUNB, MMP2, MMP9, PTHLH, SERPINE1, SNAI2, TIMP1, BCL2L1, BIRC3, CCL2, CCL22, CCL3, CCL4, CCL5, CX3CL1, CXCL1, CXCL2, CXCL3, ICAM1, IL1B, IL6, IL8, IRF1, NFKB2, NFKBIA, NFKBIE, PTGS2, SELE, STAT5A, TNF, TNFAIP2, TRAF1, VCAM1
[0303] Gene set T=0.5, N=6, UC effectiveness: EAF2, ELL2, FKBP5, LCP1, PLAU, PMEPA1, TMPRSS2, GLRX, MMP1, MMP3, MMP9, PLAUR, PTGS2, SERPINE1, TIMP1, VIM
[0304] Gene set T=0.5, N=6, CD prediction: ANGPTL4, CDKN2B, CTGF, GADD45B, IL11, INPP5D, JUNB, MMP2, MMP9, PTHLH, SERPINE1, SNAI2, TIMP1, BCL2L1, BIRC3, CCL2, CCL22, CCL3, CCL4, CCL5, CX3CL1, CXCL1, CXCL2, CXCL3, ICAM1, IL1B, IL6, IL8, IRF1, NFKB2, NFKBIA, NFKBIE, PTGS2, SELE, STAT5A, TNF, TNFAIP2, TRAF1, VCAM1, CCND1, GLRX, MMP1, MMP3, PLAU, PLAUR, VIM, CD274, FGF2, FSCN1, HIF1A, HSP90B1, IFNG, MCL1, STAT1, TNFRSF1B, TWIST1, ZEB1, CD44, COL18A1, DKK1, KIAA1199, TBX3
[0305] Gene set T=0.5, N=6, CD prediction2: ANGPTL4, CDKN2B, CTGF, GADD45B, IL11, INPP5D, JUNB, MMP2, MMP9, PTHLH, SERPINE1, SNAI2, TIMP1, BCL2L1, BIRC3, CCL2, CCL22, CCL3, CCL4, CCL5, CX3CL1, CXCL1, CXCL2, CXCL3, ICAM1, IL1B, IL6, IL8, IRF1, NFKB2, NFKBIA, NFKBIE, PTGS2, SELE, STAT5A, TNF, TNFAIP2, TRAF1, VCAM1
[0306] Gene set T=0.5, N=6, CD effectiveness: GLRX, MMP1, MMP3, MMP9, PLAU, PLAUR, PTGS2, SERPINE1, TIMP1, VIM, BCL2L1, BIRC3, CCL2, CCL22, CCL3, CCL4, CCL5, CX3CL1, CXCL1, CXCL2, CXCL3, ICAM1, IL1B, IL6, IL8, IRF1, NFKB2, NFKBIA, NFKBIE, SELE, STAT5A, TNF, TNFAIP2, TRAF1, VCAM1
   Sequences corresponding to the target genes described herein and listed in the appended sequence listing (enclosed herein by reference in its entirety). The target genes correspond to the following pathways: TGFbeta—SEQ ID Nos 1 to 71; NFkB—SEQ ID Nos 72 to 114; MPAK-AP1—SEQ ID Nos 115 to 138; STAT3—SEQ ID Nos 139 to 177; WNT—SEQ ID Nos 178-195; AR—SEQ ID Nos 196 to 213.

| | |
|---|---|
| Seq. 1 | ANGPTL4 |
| Seq. 2 | ATF3 |
| Seq. 3 | CCL2 |
| Seq. 4 | CDC42EP3 |
| Seq. 5 | CDH1 |
| Seq. 6 | CDKN1A |
| Seq. 7 | CDKN2B |
| Seq. 8 | COL1A2 |
| Seq. 9 | COL3A1 |
| Seq. 10 | COL7A1 |
| Seq. 11 | CTGF |
| Seq. 12 | CTNNB1 |
| Seq. 13 | DLX5 |
| Seq. 14 | EDN1 |
| Seq. 15 | FN1 |
| Seq. 16 | FOXP3 |
| Seq. 17 | FSHB |
| Seq. 18 | FST |
| Seq. 19 | FSTL3 |
| Seq. 20 | GADD45A |
| Seq. 21 | GADD45B |
| Seq. 22 | GNRHR |
| Seq. 23 | GSC |
| Seq. 24 | HAMP |
| Seq. 25 | HEY1 |
| Seq. 26 | HMGA2 |
| Seq. 27 | IBSP |
| Seq. 28 | ID1 |
| Seq. 29 | ID2 |
| Seq. 30 | ID3 |
| Seq. 31 | IL11 |
| Seq. 32 | IL6 |
| Seq. 33 | INPP5D |
| Seq. 34 | ITGB1 |
| Seq. 35 | ITGB5 |
| Seq. 36 | JUN |
| Seq. 37 | JUNB |
| Seq. 38 | LEFTY2 |
| Seq. 39 | MIXL1 |
| Seq. 40 | MMP13 |
| Seq. 41 | MMP2 |
| Seq. 42 | MMP9 |
| Seq. 43 | MSX2 |
| Seq. 44 | MYC |
| Seq. 45 | NKX2-5 |
| Seq. 46 | NODAL |
| Seq. 47 | OVOL1 |
| Seq. 48 | PDGFB |
| Seq. 49 | PMEPA1 |
| Seq. 50 | PPARG |
| Seq. 51 | PTGS2 |
| Seq. 52 | PTHLH |
| Seq. 53 | SERPINE1 |
| Seq. 54 | SGK1 |
| Seq. 55 | SKIL |
| Seq. 56 | SLC25A5 |
| Seq. 57 | SMAD4 |
| Seq. 58 | SMAD5 |
| Seq. 59 | SMAD6 |
| Seq. 60 | SMAD7 |
| Seq. 61 | SNAI1 |
| Seq. 62 | SNAI2 |
| Seq. 63 | SP7 |
| Seq. 64 | SPP1 |
| Seq. 65 | TAGLN |
| Seq. 66 | TERT |
| Seq. 67 | TGFBR1 |
| Seq. 68 | TIMP1 |
| Seq. 69 | VEGFA |
| Seq. 70 | VIM |
| Seq. 71 | SERPINE1 |
| Seq. 72 | BCL2 |
| Seq. 73 | BCL2L1 |
| Seq. 74 | BIRC3 |
| Seq. 75 | CCL2 |
| Seq. 76 | CCL3 |
| Seq. 77 | CCL4 |
| Seq. 78 | CCL5 |
| Seq. 79 | CCL20 |
| Seq. 80 | CCL22 |
| Seq. 81 | CSF2 |
| Seq. 82 | CX3CL1 |
| Seq. 83 | CXCL1 |
| Seq. 84 | CXCL2 |
| Seq. 85 | CXCL3 |
| Seq. 86 | CXCL10 |
| Seq. 87 | DEFB4A |
| Seq. 88 | FASLG |
| Seq. 89 | GCLC |
| Seq. 90 | ICAM1 |
| Seq. 91 | IER3 |
| Seq. 92 | IFNB1 |
| Seq. 93 | IL12B |
| Seq. 94 | IL1B |
| Seq. 95 | IL2 |
| Seq. 96 | IL23A |
| Seq. 97 | IL6 |
| Seq. 98 | IL8 |
| Seq. 99 | IRF1 |
| Seq. 100 | MMP9 |
| Seq. 101 | MYC |
| Seq. 102 | NFKB2 |
| Seq. 103 | NFKBIA |
| Seq. 104 | NFKBIE |
| Seq. 105 | NOS2 |
| Seq. 106 | PTGS2 |
| Seq. 107 | SELE |
| Seq. 108 | SOD2 |
| Seq. 109 | STAT5A |
| Seq. 110 | TNF |
| Seq. 111 | TNFAIP2 |
| Seq. 112 | TNIP1 |
| Seq. 113 | TRAF1 |
| Seq. 114 | VCAM1 |
| Seq. 115 | BCL2L11 |
| Seq. 116 | CCND1 |
| Seq. 117 | DDIT3 |
| Seq. 118 | DNMT1 |
| Seq. 119 | EGFR |
| Seq. 120 | ENPP2 |
| Seq. 121 | EZR |
| Seq. 122 | FASLG |
| Seq. 123 | FIGF |
| Seq. 124 | GLRX |
| Seq. 125 | IL2 |
| Seq. 126 | IVL |
| Seq. 127 | LOR |
| Seq. 128 | MMP1 |
| Seq. 129 | MMP3 |
| Seq. 130 | MMP9 |
| Seq. 131 | SERPINE1 |
| Seq. 132 | PLAU |
| Seq. 133 | PLAUR |
| Seq. 134 | PTGS2 |
| Seq. 135 | SNCG |
| Seq. 136 | TIMP1 |
| Seq. 137 | TP53 |
| Seq. 138 | VIM |
| Seq. 139 | AKT1 |
| Seq. 140 | BCL2 |
| Seq. 141 | BCL2L1 |
| Seq. 142 | BIRC5 |
| Seq. 143 | CCND1 |
| Seq. 144 | CD274 |
| Seq. 145 | CDKN1A |
| Seq. 146 | CRP |
| Seq. 147 | FGF2 |
| Seq. 148 | FOS |
| Seq. 149 | FSCN1 |
| Seq. 150 | FSCN2 |
| Seq. 151 | FSCN3 |
| Seq. 152 | HIF1A |
| Seq. 153 | HSP90AA1 |
| Seq. 154 | HSP90AB1 |
| Seq. 155 | HSP90B1 |
| Seq. 156 | HSPA1A |
| Seq. 157 | HSPA1B |
| Seq. 158 | ICAM1 |
| Seq. 159 | IFNG |
| Seq. 160 | IL10 |
| Seq. 161 | JunB |
| Seq. 162 | MCL1 |
| Seq. 163 | MMP1 |
| Seq. 164 | MMP3 |
| Seq. 165 | MMP9 |
| Seq. 166 | MUC1 |
| Seq. 167 | MYC |
| Seq. 168 | NOS2 |
| Seq. 169 | POU2F1 |
| Seq. 170 | PTGS2 |
| Seq. 171 | SAA1 |
| Seq. 172 | STATI |
| Seq. 173 | TIMP1 |
| Seq. 174 | TNFRSF1B |
| Seq. 175 | TWIST1 |
| Seq. 176 | VIM |
| Seq. 177 | ZEB1 |
| Seq. 178 | ASCL2 |
| Seq. 179 | AXIN2 |
| Seq. 180 | CCND1 |
| Seq. 181 | CD44 |
| Seq. 182 | DEFA6 |
| Seq. 183 | EPHB2 |
| Seq. 184 | FZD7 |
| Seq. 185 | IL8 |
| Seq. 186 | KIAA1199 |
| Seq. 187 | KLF6 |
| Seq. 188 | LGR5 |
| Seq. 189 | MYC |
| Seq. 190 | RNF43 |
| Seq. 191 | SOX9 |
| Seq. 192 | SP5 |
| Seq. 193 | TBX3 |
| Seq. 194 | TDGF1 |
| Seq. 195 | ZNRF3 |
| Seq. 196 | ABCC4 |
| Seq. 197 | AR |
| Seq. 198 | CREB3L4 |
| Seq. 199 | DHCR24 |
| Seq. 200 | EAF2 |
| Seq. 201 | ELL2 |
| Seq. 202 | FKBP5 |
| Seq. 203 | GUCY1A3 |
| Seq. 204 | KLK2 |
| Seq. 205 | KLK3 |
| Seq. 206 | LCP1 |
| Seq. 207 | LRIG1 |
| Seq. 208 | NDRG1 |
| Seq. 209 | PMEPA1 |
| Seq. 210 | PPAP2A |
| Seq. 211 | TMPRSS2 |
| Seq. 212 | UGT2B15 |
| Seq. 213 | NKX3-1 |

1. A method for treating a subject suffering from inflammatory bowel disease (IBD) with an anti-TNFalpha compound based on inferred NFkB cellular signaling pathway activity in a sample obtained from the subject, the method comprising:
providing a sample from the subject;
inferring the NFkB cellular signaling pathway activity in the sample;
comparing the inferred NFkB cellular signaling pathway activity with a threshold value;
wherein the anti-TNFalpha compound is adminstered to the subject when the inferred cellular signaling pathway activity, or optionally combined cellular signaling pathway activities, are below the threshold value;
wherein the NFkB cellular signaling pathway activity is inferred by:
determining an activity level of a transcription factor (TF) element of the NFkB cellular signaling pathway in the sample obtained from the subject, the TF element controlling transcription of three or more target genes of the NFkB cellular signaling pathway, the determining being based on evaluating a calibrated mathematical pathway model relating the expression levels of the three or more target genes of the respective cellular signaling pathway to the activity level of the TF element of the NFkB cellular signaling pathway, and
inferring the activity of the NFkB cellular signaling pathway in the subject based on the determined activity level of the TF element of the NFkB cellular signaling pathway in the sample of the subject.

2. The method according to claim 1, wherein the three or more target genes of the NFkB cellular signaling pathway are selected from BCL2L1, BIRC3, CCL2, CCL3, CCL4, CCL5, CCL20, CCL22, CX3CL1, CXCL1, CXCL2, CXCL3, ICAM1, IL1B, IL6, IL8, IRF1, MMP9, NFKB2, NFKBIA, NFKB IE, PTGS2, SELE, STAT5A, TNF, TNFAIP2, TNIP1, TRAF1, and VCAM1.

3. The method according to claim 1, wherein the IBD is Ulcerative Colitis (UC) or Crohn Disease (CD).

4-5. (canceled)

6. The method according to claim 1, wherein the activity of the respective cellular signaling is defined by the activity level of the respective TF elements.

7. The method according to claim 1, wherein the calibrated mathematical pathway model is a model that is calibrated using a ground truth dataset including samples in which transcription of the three or more target genes is induced by the respective TF elements and samples in which transcription of the three or more target genes is not induced by the respective TF elements.

8. The method according to claim 1, wherein the threshold value is independently determined from one or more reference samples.

9. The method according to claim 1, wherein the sample obtained from the subject is a gastric, colon, intestinal, or rectal sample.

10. The method according to claim 1, wherein the method further includes determining the expression levels of the target genes based on mRNA extracted from the sample obtained from the subject.

11-12. (canceled)

13. The method according to claim 1, wherein the anti-TNFalpha compound is selected from the group consisting of antibody based compounds Adalimumab, Certolizumab, Etanercept, Golimumab, Infliximab, or a biosimilar or a chimeric product of any of the preceding compounds such as the CT-P13 Infliximab biosimilar, or small molecule based compounds thalidomide, lenalidomide, pomalidomide, a xanthane derivative such as pentoxifylline, bupropion, an 5-HT_{2A} agonist such as (R)DOI, TCB2, LSD and LA-SS-Az, curcumin, catechins, cannabidiol or Echinacea purpurea.

14-15. (canceled)

16. The method according to claim 1, wherein the predicting is further based on one or more cellular signaling pathway selected from TGFbeta, MAPK-AP1, STAT3 and WNT.

17. The method according to claim 16, wherein:
the three or more target genes of the TGFbeta cellular signaling pathway are selected from ANGPTL4, CDC42EP3, CDKNIA, CDKN2B, CTGF, GADD45A, GADD45B, HMGA2, ID1, IL11, SERPINE1, INPP5D, JUNB, MMP2, MMP9, NKX2-5, OVOL1, PDGFB, PTHLH, SGK1, SKIL, SMAD4, SMAD5, SMAD6, SMAD7, SNAI1, SNAI2, TIMP1, and VEGFA.
the three or more target genes of the MAPK-AP1 cellular signaling pathway are selected from BCL2L11, CCND1, DDIT3, DNMT1, EGFR, ENPP2, EZR, FASLG, FIGF, GLRX, IL2, IVL, LOR, MMP1, MMP3, MMP9, SERPINE1, PLAU, PLAUR, PTGS2, SNCG, TIMP1, TP53, and VIM;
the three or more target genes of the STAT3 cellular signaling pathway are selected from AKT1, BCL2, BCL2L1, BIRC5, CCND1, CD274, CDKN1A, CRP, FGF2, FOS, FSCN1, FSCN2, FSCN3, HIF1A, HSP90AA1, HSP90AB1, HSP90B1, HSPA1A, HSPA1B, ICAM1, IFNG, IL10, JUNB, MCL1, MMP1, MMP3, MMP9, MUC1, MYC, NOS2, POU2F1, PTGS2, SAA1, STAT1, TIMP1, TNFRSF1B, TWIST1, VIM, and ZEB1;
the three or more target genes of the WNT cellular signaling pathway are selected from KIAA1199, AXIN2, RNF43, TBX3, TDGF1, SOX9, ASCL2, IL8, SP5, ZNRF3, KLF6, CCND1, DEFA6 and FZD7.

18. The method according to claim 16, wherein:
the three or more target genes of the TGFbeta pathway are selected from the group consisting of: ANGPTL4, CDC42EP3, CDKNIA, CTGF, GADD45A, GADD45B, HMGA2, ID1, IL11, JUNB, PDGFB, PTHLH, SERPINE1, SGK1, SKIL, SMAD4, SMAD5, SMAD6, SMAD7, SNAI2, VEGFA, more preferably, from the group consisting of: ANGPTL4, CDC42EP3, CDKNIA, CTGF, GADD45B, ID1, IL11, JUNB, SERPINE1, PDGFB, SKIL, SMAD7, SNAI2, and VEGFA, more preferably, from the group consisting of: ANGPTL4, CDC42EP3, ID1, IL11, JUNB, SERPINE1, SKIL, and SMAD7.

19. The method according to claim 16, wherein:
the three or more target genes of the MAPK-AP1 pathway are selected from the group consisting of: CCND1, EGFR, EZR, GLRX, MMP1, MMP3, PLAU, PLAUR, SERPINE1, SNCG, and TIMP1.

20. The method according to claim 16, wherein:
the three or more target genes of the STAT3 pathway are selected from either from the group consisting of: BCL2L1, BIRC5, CCND1, CD274, FOS, HIF1A, HSP90AA1, HSP90AB1, MMP1, and MYC, or from the group consisting of: BCL2L1, CD274, FOS, HSP90B1, HSPA1B, ICAM1, IFNG, JUNB, PTGS2, STAT1, TNFRSF1B, and ZEB1.

The application's sequence listing, which the Patent Office published only in electronic form, follows.

SEQUENCE LISTING (213 sequences)

SEQ ID NO: 1 - DNA, 1905 bp, Homo sapiens
ataaaaaccgtcctcgggcgcggcggggagaagccgagctgagcggatcctcacacgactgtgatccgattctttccagcggcttctgcaaccaagcgggtcttacccccggtcctccgcgtctccagtcctcgcacctggaaccccaacgtccccgagagtccccgaatccccgctcccaggctacctaagaggatgagcggtgctccgacggccggggcagccctgatgctctgcgccgccaccgccgtgctactgagcgctcagggcggacccgtgcagtccaagtcgccgcgctttgcgtcctgggacgagatgaatgtcctggcgcacggactcctgcagctcggccaggggctgcgcgaacacgcggagcgcacccgcagtcagctgagcgcgctggagcggcgcctgagcgcgtgcgggtccgcctgtcagggaaccgaggggtccaccgacctcccgttagcccctgagagccgggtggaccctgaggtccttcacagcctgcagacacaactcaaggctcagaacagcaggatccagcaactcttccacaaggtggcccagcagcagcggcacctggagaagcagcacctgcgaattcagcatctgcaaagccagtttggcctcctggaccacaagcacctagaccatgaggtggccaagcctgcccgaagaaagaggctgcccgagatggcccagccagttgacccggctcacaatgtcagccgcctgcaccggctgcccagggattgccaggagctgttccaggttggggagaggcagagtggactatttgaaatccagcctcaggggtctccgccatttttggtgaactgcaagatgacctcagatggaggctggacagtaattcagaggcgccacgatggctcagtggacttcaaccggccctgggaagcctacaaggcggggtttggggatccccacggcgagttctggctgggtctggagaaggtgcatagcatcacgggggaccgcaacagccgcctggccgtgcagctgcgggactgggatggcaacgccgagttgctgcagttctccgtgcacctgggtggcgaggacacggcctatagcctgcagctcactgcacccgtggccggccagctgggcgccaccaccgtcccacccagcggcctctccgtacccttctccacttgggaccaggatcacgacctccgcagggacaagaactgcgccaagagcctctctggaggctggtggtttggcacctgcagccattccaacctcaacggccagtacttccgctccatcccacagcagcggcagaagcttaagaagggaatcttctggaagacctggcggggccgctactacccgctgcaggccaccaccatgttgatccagcccatggcagcagaggcagcctcctagcgtcctggctgggcctggtcccaggcccacgaaagacggtgactcttggctctgcccgaggatgtggccgttccctgcctgggcaggggctccaaggaggggccatctggaaacttgtggacagagaagaagaccacgactggagaagccccctttctgagtgcaggggggctgcatgcgttgcctcctgagatcgaggctgcaggatatgctcagactctagaggcgtggaccaaggggcatggagcttcactccttgctggccagggagttggggactcagagggaccacttggggccagccagactggcctcaatggcggactcagtcacattgactgacggggaccagggcttgtgtgggtcgagagcgccctcatggtgctggtgctgttgtgtgtaggtcccctggggacacaagcaggcgccaatggtatctgggcggagctcacagagttcttggaataaaagcaacctcagaacactttg

SEQ ID NO: 2 - DNA, 2088 bp, Homo sapiens
tccgctccgttcggccggttctcccgggaagctattaatagcattacgtcagcctgggactggcaacacggagtaaacgaccgcgccgccagcctgagggctataaaaggggtgatgcaacgctctccaagccacagtcgcacgcagccaggcgcgcactgcacagctctcttctctcgccgccgcccgagcgcacccttcagcccgcgcgccggccgtgagtcctcggtgctcgcccgccggccagacaaacagcccgcccgaccccgtcccgaccctggccgccccgagcggagcctggagcaaaatgatgcttcaacacccaggccaggtctctgcctcggaagtgagtgcttctgccatcgtcccctgcctgtcccctcctgggtcactggtgtttgaggattttgctaacctgacgccctttgtcaaggaagagctgaggtttgccatccagaacaagcacctctgccaccggatgtcctctgcgctggaatcagtcactgtcagcgacagacccctcggggtgtccatcacaaaagccgaggtagcccctgaagaagatgaaaggaaaaagaggcgacgagaaagaaataagattgcagctgcaaagtgccgaaacaagaagaaggagaagacggagtgcctgcagaaagagtcggagaagctggaaagtgtgaatgctgaactgaaggctcagattgaggagctcaagaacgagaagcagcatttgatatacatgctcaaccttcatcggcccacgtgtattgtccgggctcagaatgggaggactccagaagatgagagaaacctctttatccaacagataaaagaaggaacattgcagagctaagcagtcgtggtatgggggcgactggggagtcctcattgaatcctcattttatacccaaaaccctgaagccattggagagctgtcttcctgtgtacctctagaatcccagcagcagagaaccatcaaggcgggagggcctgcagtgattcagcaggcccttcccattctgccccagagtgggtcttggaccagggcaagtgcatctttgcctcaactccaggatttaggccttaacacactggccattcttatgttccagatggcccccagctggtgtcctgcccgcctttcatctggattctacaaaaaaccaggatgcccaccgttaggattcaggcagcagtgtctgtacctcgggtgggagggatggggccatctccttcaccgtggctaccattgtcactcgtaggggatgtggagtgagaacagcatttagtgaagttgtgcaacggccagggttgtgctttctagcaaatatgctgttatgtccagaaattgtgtgtgcaagaaaactaggcaatgtactcttccgatgtttgtgtcacacaacactgatgtgacttttatatgctttttctcagatctggtttctaagagttttggggggcggggctgtcaccacgtgcagtatctcaagatattcaggtggccagaagagcttgtcagcaagaggaggacagaattctcccagcgttaacacaaaatccatgggcagtatgatggcaggtcctctgttgcaaactcagttccaaagtcacaggaagaaagcagaaagttcaacttccaaagggttaggactctccactcaatgtcttaggtcaggagttgtgtctaggctggaagagccaaagaatattccattttcctttccttgtggttgaaaaccacagtcagtggagagatgtttggaaaccacagtcagtggagcctgggtggtacccaggctttagcattattggatgtcaatagcattgtttttgtcatgtagctgttttaagaaatctggcccagggtgtttgcagctgtgagaagtcactcacactggccacaaggacgctggctactgtctattaaaattctgatgtttctgtgaaattctcagagtgtttaattgtactcaatggtatcattacaattttctgtaagagaaaatattacttatttatcctagtattcctaacctgtcagaataataaatattggaaccaagacatggtaaacaaaaaaaaaaaaaa

SEQ ID NO: 3 - DNA, 760 bp, Homo sapiens
gaggaaccgagaggctgagactaacccagaaacatccaattctcaaactgaagctcgcactctcgcctccagcatgaaagtctctgccgcccttctgtgcctgctgctcatagcagccaccttcattccccaagggctcgctcagccagatgcaatcaatgccccagtcacctgctgttataacttcaccaataggaagatctcagtgcagaggctcgcgagctatagaagaatcaccagcagcaagtgtcccaaagaagctgtgatcttcaagaccattgtggccaaggagatctgtgctgaccccaagcagaagtgggttcaggattccatggaccacctggacaagcaaacccaaactccgaagacttgaacactcactccacaacccaagaatctgcagctaacttattttcccctagctttccccagacaccctgttttattttattataatgaattttgtttgttgatgtgaaacattatgccttaagtaatgttaattcttatttaagttattgatgttttaagtttatctttcatggtactagtgttttttagatacagagacttggggaaattgcttttcctcttgaaccacagttctacccctgggatgttttgagggtctttgcaagaatcattaatacaaagaattttttttaacattccaatgcattgctaaaatattattgtggaaatgaatattttgtaactattacaccaaataaatatatttttgtacaaaaaaaaaaaaaaa

SEQ ID NO: 4 - DNA, 5715 bp, Homo sapiens
cgcgcccaccggagcccgggctgagagggacctggggagctgcggcctggccggggcggcgcactcaggtggcctcgcttccctgcgggtcaccgcccgccactcgcacagctaggtcggcctgttgggatcgggagaggtgggcgcacgagttttagtgcgggagtccggggtgcgggcggagtcctattgtccccgtgcacccgggcggcagcacctccgggtccctctttaaaccgagcgtccggcgacctttctttgtgcttagggagtcgaaagcggcatcttctccgagagaagtcgcctactggggggtggcgctggggaggtaacaatgggcgcccattgtcctccgagggtccaacggtgacccccccccgcgcgcgcgcccggccaccggttggccccgggccagggcacaggtaccgcggctgggagggtcggccccgctgcccgcgccctccgccccgccccagtgagtccccgcgccgccggccccgccccgcgccgccccgccctccgcaggttcagtcctcgcgtccggccgccccgcgctcagtcgcgcgcaccttctctcgcggccgggggaccgcagcgcggggctagcccggagacccggccaccggcctggggcgccttcacgccgtctcggagcggataatgcggtgagcaggcaccacgccggcagactcggctggatctgcgcacagcggcagggattgcgtgcgcccgcgggaggcccggggcagcggctgggatcctcagcggcggccggtttgtcctggttgtggtcaagactggatgatgtaactggctctctaggaagcctcacttggccgtaacctcaggaaggttctctttgaccccatctcatttcgaagccacttctgaagccacttgagaaaaatgatgtgacagttcctatcaaaaaggattcagaaacatataccatctgtgaagaaagtggccctttctcccgcttgcaaaatagacattctcaaattccaaaatgccagccaagaccccaatttacctgaaagcagccaataacaagaaaggaaagaaatttaaactgagggacattctgtctcctgatatgatcagtcccccgcttggagactttcgccacaccatccacattggcaaagagggccagcacgatgtctttggagatatttcctttcttcaagggaactacgagcttttacctggaaaccaggagaaagcacacctgggccagttccctgggcataatgagttcttccgggccaacagcacctcggactctgtgttcacagaaacgccctccccggtgctcaaaaatgccatctccctcccgaccattggaggatcccaagctctcatgttgcccttattgtcaccagtgacatttaattccaaacaggagtccttcgggccagcaaagctgcccaggcttagctgcgagcccgtcatggaggaaaaagctcaggagaaaagcagtctgttggagaatgggacagtccaccagggagacacctcgtggggctccagcggttctgcatctcagtccagccaaggcagagacagccactcctccagcctgtccgaacagtaccccgactggccagccgaggacatgtttgaccatcccaccccatgcgagctcatcaagggaaagactaagtcagaggagtccctctctgaccttacaggttccctcctctccctgcagcttgatcttgggccctcacttttggatgaggtgctgaatgtaatggataaaaataagtaacaagatgccaacttttttcctttggggtaaaaggtacaaaaacaaactaaccacagttgaagagaagggcttccggagctgtatttgcagttttgtgttgggttttctaaaataatattcttacaaagtatttttttacctgttatgccctgtttgcaaaaacaatttagaaaaaaacaacaaagcaaaacctatcttggcaaaaaaaggaagtgagtcagagcccattttcaggaggcattggtgatgttcggctcacatattgtttgcagacacacaagaaatctggcttggccaggattggcactagctatgaagggctgagcgagtcacattaaggaacttcacggaactttatagcactccgacattttctgagcaagaggaagtcaaaatttatttaacacctaagcctttttgtagactcttttctatatattgcttaggctcaccatagcgaattctccagtgttaaaacttttctgttttcacatttgaactttatgggttttggggattttcttgtagttcttatatatccctatatattatatctatattgcaaaattttgactgtcagctacatgttggtaagacacaggcaaagtattactgtaactaagttatttttaaagttaaaatatatttttacgtgcctttggctttttattgcagagtctacattttatagattctacatcagatgttgtcacttatttccattgggattccattgtaagctgtgtatgtgcgtgtttggaaaagtgtattcatacttagtttttttttcttcatctgttatcatacttttaacagcaaccaataacggattgtaaagtgtaaaggcacaggttactcatgatgcttctgcagagactgtgggctacaccacatatgttatttggaaatataggtattttagtacagtacatacttgcattacataggtacttcaagcaacacaataaaaagtaaatgataaagtgaacttgcttgtttatagtaataaacaagaccataagagaataagtatagctagagaaattgcttctctgaaatgtacatgagcccttaaggtaagagatgatttccatctactctcattttgattacttccttatggtttgagaggctagaaactgagcctctctacttttggaaaaatgaacatgtgaggtcagatttttttttttttttttaagtcagcactgatgccaccctctcagtggtcatttctgagcatcttcctgacttgaacaccttctacagcaaactcttgcaagtccagtttcatccctgtaaggcaaatgtcttttcacgcagaaagtgccatatagacgagataaaggcagctaaaacgagggcagtagagagcacttacccgaccccaaggtgccagagatgccctgaggatggtggttaaggaaacaggagcaggaaatgtacacacagattcctgtccctttgccaactactccttccccatcaaagaaaaacacttgcacacagtaactaccagctccttctctcaaacttgtatttctcctggaaatgtatctcagaaatgacctcctctcccaaccacttcaacgattctttctttgggtttggggttcttgcagttctatcatctaaaataacctttggactgcaggtaaaatgcaattaggacaactaaccaagtagacgaaacaagttcccctaggcaggggtgtccaatattttagcttccctggaccgcattggaagaattttcttgggccacatgtaaaacacactaacactaaccatagttgatgagcttaaaaaaataaaaatagaaaattgcaaaaaaaaaaaaaaaaaaaaatctcagactgttttaagaaagtttaaaaatttgtgttggacttcatgcgggccacaggttggacaagcttgccctagggcattgtgtgctttccgtaacttctcagttgtatttcgttatccatgactctccagtgttttttctgttggaccacacccgtcacagttcacagttccaaagagaaatttcccagcctattctaaatcttgttaatgacgaagagtccaatgtatctcattatttgtagccaattttagactcttttcaatacctcccccccattttaattagtattgatcatattcagtctttcattttactcttcatctgtagcgtgacctcaaggtaaagatgaaactatttcatgaaaaggggaggagtatggctgtgcattagctctactccctctctggtaagtactggggagagaacagccctgccagtactgggtttgatagattctaaatattaatcacacatcctgcctacagttagccattttagtttctgggagttctttcatgtacattttcttccattaattgaattaggtataattgagatggcaataaatatgcccgtattagaaagaggaaacaaagctacatgcggcttatgattttgttgagtcacttctcccgaggcagcctttccaatgcctggtcccttcccctgagagcaggtggactgctggtggtggctttctttcctgcagagaggcactttagacccatacctgctgtgagctgaattgatgttctcatcctgtgaaccttctcccactttaacctaatttatctttacttgtttaaagataaggaaacccaagatgtactttatttgcaaactcaaagcaaatggcgagccacctgtgacccagtaaccagaaaagaaaccatgccatttgtataagtagagacacttcttgttgaggtaggcaaggctcttgtgagcgatttttttcccctagtgagacctaacaaaagacaagctatatcatttctgcctgaaattatctgcttgaaaagatcaaaatatcaggatacttagctcttcacaaatatgaagtcattatcacatttcactgagccagaaatcactgttaacagcacacacaaaagactacactggttgaacagcaaagagaaacccgggtctccagaatcacagtttagtccttctatattactgcaagtgacctgttttttctgaaggctccccgcaaatgaagtcctggaatggaaaaaatccataagtccataaattaacttgataaatattttagaacagacaaaagaaaatattgagtgatgtagttctaatcctcctaatatggaacctggcaagactgaatcattttactgtgaaatatataaacacaatagaatgagccaacatgatggtttctctccagtaagagtttttcttttggaaatgaggttaacctagccccaaatctagcaattctcataaaatccgattttagaattagcctcccagattaatctgaatgattgacttattttttcttaggcaagtcagtaagccacccactagacagccatatccagcaaaataagagaagtttccagatgccaaatgataagccaccatcaacccagcggggaagccttctggttggtttggctgtatgagattcaggaaggccagaatacccaaaattattcacacgacgttaacttattggtactggctaagcaatacatgtatttcctaaaggaggagatggtcttttggttgatttatggacacacttgtttcatctgactgtaaatatattgcatgctttattctgatggtgcactatttcatccagcaagcttttcatctgagaatgtttaatgttgaccttattcttagagcaagtagatctaaatatttttcagctgagttattagggagtcattattctgtggtacaatgctgcaaaaagcatcatgtggaagaatgggaactatgcttactttatgaagtgatgtataacacaatgaaatctgttttacaactactgtgctgcatttaattatcttccatttttgctgttaaaaaaaaaaaatccgttaatgatgtc

SEQ ID NO: 5 - DNA, 4815 bp, Homo sapiens
agtggcgtcggaactgcaaagcacctgtgagcttgcggaagtcagttcagactccagcccgctccagcccggcccgacccgaccgcacccggcgcctgccctcgctcggcgtccccggccagccatgggcccttggagccgcagcctctcggcgctgctgctgctgctgcaggtctcctcttggctctgccaggagccggagccctgccaccctggctttgacgccgagagctacacgttcacggtgccccggcgccacctggagagaggccgcgtcctgggcagagtgaattttgaagattgcaccggtcgacaaaggacagcctatttttccctcgacacccgattcaaagtgggcacagatggtgtgattacagtcaaaaggcctctacggtttcataacccacagatccatttcttggtctacgcctgggactccacctacagaaagttttccaccaaagtcacgctgaatacagtggggcaccaccaccgccccccgccccatcaggcctccgtttctggaatccaagcagaattgctcacatttcccaactcctctcctggcctcagaagacagaagagagactgggttattcctcccatcagctgcccagaaaatgaaaaaggcccatttcctaaaaacctggttcagatcaaatccaacaaagacaaagaaggcaaggttttctacagcatcactggccaaggagctgacacaccccctgttggtgtctttattattgaaagagaaacaggatggctgaaggtgacagagcctctggatagagaacgcattgccacatacactctcttctctcacgctgtgtcatccaacgggaatgcagttgaggatccaatggagattttgatcacggtaaccgatcagaatgacaacaagcccgaattcacccaggaggtctttaaggggtctgtcatggaaggtgctcttccaggaacctctgtgatggaggtcacagccacagacgcggacgatgatgtgaacacctacaatgccgccatcgcttacaccatcctcagccaagatcctgagctccctgacaaaaatatgttcaccattaacaggaacacaggagtcatcagtgtggtcaccactgggctggaccgagagagtttccctacgtataccctggtggttcaagctgctgaccttcaaggtgaggggttaagcacaacagcaacagctgtgatcacagtcactgacaccaacgataatcctccgatcttcaatcccaccacgtacaagggtcaggtgcctgagaacgaggctaacgtcgtaatcaccacactgaaagtgactgatgctgatgcccccaataccccagcgtgggaggctgtatacaccatattgaatgatgatggtggacaatttgtcgtcaccacaaatccagtgaacaacgatggcattttgaaaacagcaaagggcttggattttgaggccaagcagcagtacattctacacgtagcagtgacgaatgtggtaccttttgaggtctctctcaccacctccacagccaccgtcaccgtggatgtgctggatgtgaatgaagcccccatctttgtgcctcctgaaaagagagtggaagtgtccgaggactttggcgtgggccaggaaatcacatcctacactgcccaggagccagacacatttatggaacagaaaataacatatcggatttggagagacactgccaactggctggagattaatccggacactggtgccatttccactcgggctgagctggacagggaggattttgagcacgtgaagaacagcacgtacacagccctaatcatagctacagacaatggttctccagttgctactggaacagggacacttctgctgatcctgtctgatgtgaatgacaacgcccccataccagaacctcgaactatattcttctgtgagaggaatccaaagcctcaggtcataaacatcattgatgcagaccttcctcccaatacatctcccttcacagcagaactaacacacggggcgagtgccaactggaccattcagtacaacgacccaacccaagaatctatcattttgaagccaaagatggccttagaggtgggtgactacaaaatcaatctcaagctcatggataaccagaataaagaccaagtgaccaccttagaggtcagcgtgtgtgactgtgaaggggccgctggcgtctgtaggaaggcacagcctgtcgaagcaggattgcaaattcctgccattctggggattcttggaggaattcttgctttgctaattctgattctgctgctcttgctgtttcttcggaggagagcggtggtcaaagagcccttactgcccccagaggatgacacccgggacaacgtttattactatgatgaagaaggaggcggagaagaggaccaggactttgacttgagccagctgcacaggggcctggacgctcggcctgaagtgactcgtaacgacgttgcaccaaccctcatgagtgtcccccggtatcttccccgccctgccaatcccgatgaaattggaaattttattgatgaaaatctgaaagcggctgatactgaccccacagccccgccttatgattctctgctcgtgtttgactatgaaggaagcggttccgaagctgctagtctgagctccctgaactcctcagagtcagacaaagaccaggactatgactacttgaacgaatggggcaatcgcttcaagaagctggctgacatgtacggaggcggcgaggacgactaggggactcgagagaggcgggccccagacccatgtgctgggaaatgcagaaatcacgttgctggtggtttttcagctcccttcccttgagatgagtttctggggaaaaaaaagagactggttagtgatgcagttagtatagctttatactctctccactttatagctctaataagtttgtgttagaaaagtttcgacttatttcttaaagcttttttttttttcccatcactctttacatggtggtgatgtccaaaagatacccaaattttaatattccagaagaacaactttagcatcagaaggttcacccagcaccttgcagattttcttaaggaattttgtctcacttttaaaaagaaggggagaagtcagctactctagttctgttgttttgtgtatataattttttaaaaaaaatttgtgtgcttctgctcattactacactggtgtgtccctctgccttttttttttttttaagacagggtctcattctatcggccaggctggagtgcagtggtgcaatcacagctcactgcagccttgtcctcccaggctcaagctatccttgcacctcagcctcccaagtagctgggaccacaggcatgcaccactacgcatgactaattttttaaatatttgagacggggtctccctgtgttacccaggctggtctcaaactcctgggctcaagtgatcctcccatcttggcctcccagagtattgggattacagacatgagccactgcacctgcccagctccccaactccctgccattttttaagagacagtttcgctccatcgcccaggcctgggatgcagtgatgtgatcatagctcactgtaacctcaaactctggggctcaagcagttctcccaccagcctcctttttatttttttgtacagatggggtcttgctatgttgcccaagctggtcttaaactcctggcctcaagcaatccttctgccttggccccccaaagtgctgggattgtgggcatgagctgctgtgcccagcctccatgttttaatatcaactctcactcctgaattcagttgctttgcccaagataggagttctctgatgcagaaattattgggctcttttagggtaagaagtttgtgtctttgtctggccacatcttgactaggtattgtctactctgaagacctttaatggcttccctctttcatctcctgagtatgtaacttgcaatgggcagctatccagtgacttgttctgagtaagtgtgttcattaatgtttatttagctctgaagcaagagtgatatactccaggacttagaatagtgcctaaagtgctgcagccaaagacagagcggaactatgaaaagtgggcttggagatggcaggagagcttgtcattgagcctggcaatttagcaaactgatgctgaggatgattgaggtgggtctacctcatctctgaaaattctggaaggaatggaggagtctcaacatgtgtttctgacacaagatccgtggtttgtactcaaagcccagaatccccaagtgcctgcttttgatgatgtctacagaaaatgctggctgagctgaacacatttgcccaattccaggtgtgcacagaaaaccgagaatattcaaaattccaaatttttttcttaggagcaagaagaaaatgtggccctaaagggggttagttgaggggtagggggtagtgaggatcttgatttggatctctttttatttaaatgtgaatttcaacttttgacaatcaaagaaaagacttttgttgaaatagctttactgtttctcaagtgttttggagaaaaaaatcaaccctgcaatcactttttggaattgtcttgatttttcggcagttcaagctatatcgaatatagttctgtgtagagaatgtcactgtagttttgagtgtatacatgtgtgggtgctgataattgtgtattttctttgggggtggaaaaggaaaacaattcaagctgagaaaagtattctcaaagatgcatttttataaattttattaaacaattttgttaaaccat

SEQ ID NO: 6 - DNA, 2122 bp, Homo sapiens
ggtggctattttgtccttgggctgcctgttttcagctgctgcaaccacagggatttcttctgttcaggcgccatgtcagaaccggctggggatgtccgtcagaacccatgcggcagcaaggcctgccgccgcctcttcggcccagtggacagcgagcagctgagccgcgactgtgatgcgctaatggcgggctgcatccaggaggcccgtgagcgatggaacttcgactttgtcaccgagacaccactggagggtgacttcgcctgggagcgtgtgcggggccttggcctgcccaagctctaccttcccacggggccccggcgaggccgggatgagttgggaggaggcaggcggcctggcacctcacctgctctgctgcaggggacagcagaggaagaccatgtggacctgtcactgtcttgtacccttgtgcctcgctcaggggagcaggctgaagggtccccaggtggacctggagactctcagggtcgaaaacggcggcagaccagcatgacagatttctaccactccaaacgccggctgatcttctccaagaggaagccctaatccgcccacaggaagcctgcagtcctggaagcgcgagggcctcaaaggcccgctctacatcttctgccttagtctcagtttgtgtgtcttaattattatttgtgttttaatttaaacacctcctcatgtacataccctggccgccccctgccccccagcctctggcattagaattatttaaacaaaaactaggcggttgaatgagaggttcctaagagtgctgggcatttttattttatgaaatactatttaaagcctcctcatcccgtgttctccttttcctctctcccggaggttgggtgggccggcttcatgccagctacttcctcctccccacttgtccgctgggtggtaccctctggaggggtgtggctccttcccatcgctgtcacaggcggttatgaaattcaccccctttcctggacactcagacctgaattctttttcatttgagaagtaaacagatggcactttgaaggggcctcaccgagtgggggcatcatcaaaaactttggagtcccctcacctcctctaaggttgggcagggtgaccctgaagtgagcacagcctagggctgagctggggacctggtaccctcctggctcttgatacccccctctgtcttgtgaaggcagggggaaggtggggtcctggagcagaccaccccgcctgccctcatggcccctctgacctgcactggggagcccgtctcagtgttgagccttttccctctttggctcccctgtaccttttgaggagccccagctacccttcttctccagctgggctctgcaattcccctctgctgctgtccctcccccttgtcctttcccttcagtaccctctcagctccaggtggctctgaggtgcctgtcccacccccacccccagctcaatggactggaaggggaagggacacacaagaagaagggcaccctagttctacctcaggcagctcaagcagcgaccgccccctcctctagctgtgggggtgagggtcccatgtggtggcacaggcccccttgagtggggttatctctgtgttaggggtatatgatgggggagtagatctttctaggagggagacactggcccctcaaatcgtccagcgaccttcctcatccaccccatccctccccagttcattgcactttgattagcagcggaacaaggagtcagacattttaagatggtggcagtagaggctatggacagggcatgccacgtgggctcatatggggctgggagtagttgtctttcctggcactaacgttgagcccctggaggcactgaagtgcttagtgtacttggagtattggggtctgaccccaaacaccttccagctcctgtaacatactggcctggactgttttctctcggctccccatgtgtcctggttcccgtttctccacctagactgtaaacctctcgagggcagggaccacaccctgtactgttctgtgtctttcacagctcctcccacaatgctgaatatacagcaggtgctcaataaatgattcttagtgactttacttgtaaaaaaaaaaaaaaaaaa

SEQ ID NO: 7 - DNA, 3878 bp, Homo sapiens
ggctccccactctgccagagcgaggcggggcagtgaggactccgcgacgcgtccgcaccctgcggccagagcggctttgagctcggctgcgtccgcgctaggcgctttttcccagaagcaatccaggcgcgcccgctggttcttgagcgccaggaaaagcccggagctaacgaccggccgctcggccactgcacggggccccaagccgcagaaggacgacgggagggtaatgaagctgagcccaggtctcctaggaaggagagagtgcgccggagcagcgtgggaaagaagggaagagtgtcgttaagtttacggccaacggtggattatccgggccgctgcgcgtctgggggctgcggaatgcgcgaggagaacaagggcatgcccagtgggggcggcagcgatgagggtctggccagcgccgcggcgcggggactagtggagaaggtgcgacagctcctggaagccggcgcggatcccaacggagtcaaccgtttcgggaggcgcgcgatccaggtcatgatgatgggcagcgcccgcgtggcggagctgctgctgctccacggcgcggagcccaactgcgcagaccctgccactctcacccgaccggtgcatgatgctgcccgggagggcttcctggacacgctggtggtgctgcaccgggccggggcgcggctggacgtgcgcgatgcctggggtcgtctgcccgtggacttggccgaggagcggggccaccgcgacgttgcagggtacctgcgcacagccacgggggactgacgccaggttccccagccgcccacaacgactttattttcttacccaatttcccacccccacccacctaattcgatgaaggctgccaacggggagcggcggaaagcctgtaagcctgcaagcctgtctgagactcacaggaaggaggagccgaccgggaataaccttccatacatttttttctttgtcttatctggccctcgacactcaccatgaagcgaaacacagagaagcggatttccagggatatttaggagtgtgtgacattccaggggtcgtttgcttttcagggttttctgagggaaagtgcatatgaaatccttgactggacctggtggctacgaatcttccgatggatgaatctcccactccagcgctgagtgggagaaggcagtgattagcacttgggtgacggcagtcgatgcgttcactccaatgtctgctgaggagttatggtgaacccacaacttaggccctagcggcagaaaggaaaacctgaagactgaggacaaagtggaggagggccgaggtgggcttcagtaagtccccggcggcgctttagtttgagcgcatggcaagtcacatgcgtaaacgacactctctggaagccctggagaccctcgcccaactccaccagatagcagaggggtaagagaggatgtgcaagcgacgacagatgctaaaatccctggatcacgacgctgcagagcacctttgcacaggatgctggcctttgctcttactacactgaggagagattcccgcgggttccgcaggcagactacacaggatgaggtggtggagtggagtgagagcaattgtaacggttaactgtaacgttttctttcacacacacacacacacacacacacacacatgctaggatgcggaaatccccttatgacttgctactttttgattttgtgatattttgtactttttagttgttcagcaactgtcttatttaatggggagattttaagtaacataactagtggctctcagttaaaatgtgaggaagaactacagctcttaaatgtagcaatggcactgttgcaaactcagtgcaaacgcctagattgctttcttcttaacctatttatttctttgttaaatttttctgattgtttcctttatagagtgtctcagggtgcagaggtcagactaagaaatattccaaatgtcttttagaagatagatgcacttatgcagtaaattatcttgggatagttcccaaaagattgctgaaaaagtagattgagtataaaaacttgaaaatatatgatggctcgtgggatgtcctactatcactgaacaaactaaaggtgcactgctttgggatttaatttccagggttgcttgatcattatatcattggaacaactgatacttcactactttaataaagaattaacagagattgaactccaagaggtgggtaatttggtttaaaaatacatgttcatgggtttaccactaactcctgagaaatgttaaaggttcacaggggttcccttctctcaatgtttgtaataattgctcataagcaataccagcaattcataaaaactgcttacttatgccatagaaaattaaacacaaagtgtatacatgtattatgcttctaaatgctcattctaccagatacacatttaaaagagaaaaaaggaacagaaacaagtcatttgagagtggagacttataagaaggagtacatttgagttgaatacacaaatctttacttctctaccaattcctattcccaaaatgaacatattactggggaaagttagttgagaatcagagcatatgttattggggaaaggatatgtttattgacacataatctgtaccaggtatgcattaaaatatatttgttaatttaatatttaaacctgagagataggtattgtttcccagatgaggacaatgaggcaaagaaatatcaagtaacttgccaaaggttacaagatattcattccatggatgcacaaagaagtgcatctagttccacagctgattatggttgtcttgcttttcttcccattgcaccagcttgtcctccaaaatcatgaatgatacacatgaagataactttttttaaaaaaaagcagaaatacacaatgatctcccttgtaagctcctaaggtggcttttctttctctaacttctagtaaatataaacggtttgtttgaaaactattttaaaatgtcaacaatatggagaataaccccccccaacacacctataaaaacccaaatttttggaacaaagataatggaacctccattttcaaactgaagcacagggacagaaaatatatttctagttatcacttaagcactcaatcattagaggctacaagaataatatttttaaagttacagtattttacaattattagaaaacattctatataaaagaagtcagttgatactttaaaatctcccatttggtttataaaatcccttaatttgacctctatatcttaaattccaagatgtttaaatttgctagttgcattatactgggtcatgaaaaattatcccttgaaatagatatgaaacatgttacttcatttctggtttaaataacttgtggaatctttcctaatgacaacctgatattaagggaaactaaagaaaatgttattgtggatcccacagtactatattacactgttttttttgtttgttttgttagttttttttatttaaagcaaacctcaaacattattgggtatcaattaccacctggttgtattgaaatagtaacttatcaatgccatgtaaaaattaattccattttcgaagccacctggcagacaggtttagctgtttcatcagcagcctaatatatactgttaaatttgttaaggatttcactttgaaggatacatgcaaaacatatagttactattttcatgagtcctgcttctagctccattgtggaatacagaaaattaaatatacctgttaagttcgtatctaaacctaagacattaccaaggtttgtacaaattctactacctgacatttattccaagaagatctggaaagttaaataaatttataaatttaataacaaaaaaaaaaaaaaaaaa

SEQ ID NO: 8 - DNA, 5411 bp, Homo sapiens
gtgtcccatagtgtttccaaacttggaaagggcgggggagggcgggaggatgcggagggcggaggtatgcagacaacgagtcagagtttccccttgaaagcctcaaaagtgtccacgtcctcaaaaagaatggaaccaatttaagaagccagccccgtggccacgtcccttcccccattcgctccctcctctgcgcccccgcaggctcctcccagctgtggctgcccgggcccccagccccagccctcccattggtggaggcccttttggaggcaccctagggccagggaaacttttgccgtataaatagggcagatccgggctttattattttagcaccacggcagcaggaggtttcggctaagttggaggtactggccacgactgcatgcccgcgcccgccaggtgatacctccgccggtgacccaggggctctgcgacacaaggagtctgcatgtctaagtgctagacatgctcagctttgtggatacgcggactttgttgctgcttgcagtaaccttatgcctagcaacatgccaatctttacaagaggaaactgtaagaaagggcccagccggagatagaggaccacgtggagaaaggggtccaccaggccccccaggcagagatggtgaagatggtcccacaggccctcctggtccacctggtcctcctggcccccctggtctcggtgggaactttgctgctcagtatgatggaaaaggagttggacttggccctggaccaatgggcttaatgggacctagaggcccacctggtgcagctggagccccaggccctcaaggtttccaaggacctgctggtgagcctggtgaacctggtcaaactggtcctgcaggtgctcgtggtccagctggccctcctggcaaggctggtgaagatggtcaccctggaaaacccggacgacctggtgagagaggagttgttggaccacagggtgctcgtggtttccctggaactcctggacttcctggcttcaaaggcattaggggacacaatggtctggatggattgaagggacagcccggtgctcctggtgtgaagggtgaacctggtgcccctggtgaaaatggaactccaggtcaaacaggagcccgtgggcttcctggtgagagaggacgtgttggtgcccctggcccagctggtgcccgtggcagtgatggaagtgtgggtcccgtgggtcctgctggtcccattgggtctgctggccctccaggcttcccaggtgcccctggccccaagggtgaaattggagctgttggtaacgctggtcctgctggtcccgccggtccccgtggtgaagtgggtcttccaggcctctccggccccgttggacctcctggtaatcctggagcaaacggccttactggtgccaagggtgctgctggccttcccggcgttgctggggctcccggcctccctggaccccgcggtattcctggccctgttggtgctgccggtgctactggtgccagaggacttgttggtgagcctggtccagctggctccaaaggagagagcggtaacaagggtgagcccggctctgctgggccccaaggtcctcctggtcccagtggtgaagaaggaaagagaggccctaatggggaagctggatctgccggccctccaggacctcctgggctgagaggtagtcctggttctcgtggtcttcctggagctgatggcagagctggcgtcatgggccctcctggtagtcgtggtgcaagtggccctgctggagtccgaggacctaatggagatgctggtcgccctggggagcctggtctcatgggacccagaggtcttcctggttcccctggaaatatcggccccgctggaaaagaaggtcctgtcggcctccctggcatcgacggcaggcctggcccaattggcccagctggagcaagaggagagcctggcaacattggattccctggacccaaaggccccactggtgatcctggcaaaaacggtgataaaggtcatgctggtcttgctggtgctcggggtgctccaggtcctgatggaaacaatggtgctcagggacctcctggaccacagggtgttcaaggtggaaaaggtgaacagggtccccctggtcctccaggcttccagggtctgcctggcccctcaggtcccgctggtgaagttggcaaaccaggagaaaggggtctccatggtgagtttggtctccctggtcctgctggtccaagaggggaacgcggtcccccaggtgagagtggtgctgccggtcctactggtcctattggaagccgaggtccttctggacccccagggcctgatggaaacaagggtgaacctggtgtggttggtgctgtgggcactgctggtccatctggtcctagtggactcccaggagagaggggtgctgctggcatacctggaggcaagggagaaaagggtgaacctggtctcagaggtgaaattggtaaccctggcagagatggtgctcgtggtgctcctggtgctgtaggtgcccctggtcctgctggagccacaggtgaccggggcgaagctggggctgctggtcctgctggtcctgctggtcctcggggaagccctggtgaacgtggtgaggtcggtcctgctggccccaatggatttgctggtcctgctggtgctgctggtcaacctggtgctaaaggagaaagaggagccaaagggcctaagggtgaaaacggtgttgttggtcccacaggccccgttggagctgctggcccagctggtccaaatggtccccccggtcctgctggaagtcgtggtgatggaggcccccctggtatgactggtttccctggtgctgctggacggactggtcccccaggaccctctggtatttctggccctcctggtccccctggtcctgctgggaaagaagggcttcgtggtcctcgtggtgaccaaggtccagttggccgaactggagaagtaggtgcagttggtccccctggcttcgctggtgagaagggtccctctggagaggctggtactgctggacctcctggcactccaggtcctcagggtcttcttggtgctcctggtattctgggtctccctggctcgagaggtgaacgtggtctaccaggtgttgctggtgctgtgggtgaacctggtcctcttggcattgccggccctcctggggcccgtggtcctcctggtgctgtgggtagtcctggagtcaacggtgctcctggtgaagctggtcgtgatggcaaccctgggaacgatggtcccccaggtcgcgatggtcaacccggacacaagggagagcgcggttaccctggcaatattggtcccgttggtgctgcaggtgcacctggtcctcatggccccgtgggtcctgctggcaaacatggaaaccgtggtgaaactggtccttctggtcctgttggtcctgctggtgctgttggcccaagaggtcctagtggcccacaaggcattcgtggcgataagggagagcccggtgaaaaggggcccagaggtcttcctggcttaaagggacacaatggattgcaaggtctgcctggtatcgctggtcaccatggtgatcaaggtgctcctggctccgtgggtcctgctggtcctaggggccctgctggtccttctggccctgctggaaaagatggtcgcactggacatcctggtacagttggacctgctggcattcgaggccctcagggtcaccaaggccctgctggcccccctggtccccctggccctcctggacctccaggtgtaagcggtggtggttatgactttggttacgatggagacttctacagggctgaccagcctcgctcagcaccttctctcagacccaaggactatgaagttgatgctactctgaagtctctcaacaaccagattgagacccttcttactcctgaaggctctagaaagaacccagctcgcacatgccgtgacttgagactcagccacccagagtggagcagtggttactactggattgaccctaaccaaggatgcactatggatgctatcaaagtatactgtgatttctctactggcgaaacctgtatccgggcccaacctgaaaacatcccagccaagaactggtataggagctccaaggacaagaaacacgtctggctaggagaaactatcaatgctggcagccagtttgaatataatgtagaaggagtgacttccaaggaaatggctacccaacttgccttcatgcgcctgctggccaactatgcctctcagaacatcacctaccactgcaagaacagcattgcatacatggatgaggagactggcaacctgaaaaaggctgtcattctacagggctctaatgatgttgaacttgttgctgagggcaacagcaggttcacttacactgttcttgtagatggctgctctaaaaagacaaatgaatggggaaagacaatcattgaatacaaaacaaataagccatcacgcctgcccttccttgatattgcacctttggacatcggtggtgctgaccaggaattctttgtggacattggcccagtctgtttcaaataaatgaactcaatctaaattaaaaaagaaagaaatttgaaaaaactttctctttgccatttcttcttcttcttttttaactgaaagctgaatccttccatttcttctgcacatctacttgcttaaattgtgggcaaaagagaaaaagaaggattgatcagagcattgtgcaatacagtttcattaactccttcccccgctcccccaaaaatttgaatttttttttcaacactcttacacctgttatggaaaatgtcaacctttgtaagaaaaccaaaataaaaattgaaaaataaaaaccataaacatttgcaccacttgtggcttttgaatatcttccacagagggaagtttaaaacccaaacttccaaaggtttaaactacctcaaaacactttcccatgagtgtgatccacattgttaggtgctgacctagacagagatgaactgaggtccttgttttgttttgttcataatacaaaggtgctaattaatagtatttcagatacttgaagaatgttgatggtgctagaagaatttgagaagaaatactcctgtattgagttgtatcgtgtggtgtattttttaaaaaatttgatttagcattcatattttccatcttattcccaattaaaagtatgcagattatttgcccaaatcttcttcagattcagcatttgttctttgccagtctcattttcatcttcttccatggttccacagaagctttgtttcttgggcaagcagaaaaattaaattgtacctattttgtatatgtgagatgtttaaataaattgtgaaaaaaatgaaataaagcatgtttggttttccaaaagaacatat

SEQ ID NO: 9 - DNA, 5490 bp, Homo sapiens
ggctgagttttatgacgggcccggtgctgaagggcagggaacaacttgatggtgctactttgaactgcttttcttttctcctttttgcacaaagagtctcatgtctgatatttagacatgatgagctttgtgcaaaaggggagctggctacttctcgctctgcttcatcccactattattttggcacaacaggaagctgttgaaggaggatgttcccatcttggtcagtcctatgcggatagagatgtctggaagccagaaccatgccaaatatgtgtctgtgactcaggatccgttctctgcgatgacataatatgtgacgatcaagaattagactgccccaacccagaaattccatttggagaatgttgtgcagtttgcccacagcctccaactgctcctactcgccctcctaatggtcaaggacctcaaggccccaagggagatccaggccctcctggtattcctgggagaaatggtgaccctggtattccaggacaaccagggtcccctggttctcctggcccccctggaatctgtgaatcatgccctactggtcctcagaactattctccccagtatgattcatatgatgtcaagtctggagtagcagtaggaggactcgcaggctatcctggaccagctggccccccaggccctcccggtccccctggtacatctggtcatcctggttcccctggatctccaggataccaaggaccccctggtgaacctgggcaagctggtccttcaggccctccaggacctcctggtgctataggtccatctggtcctgctggaaaagatggagaatcaggtagacccggacgacctggagagcgaggattgcctggacctccaggtatcaaaggtccagctgggatacctggattccctggtatgaaaggacacagaggcttcgatggacgaaatggagaaaagggtgaaacaggtgctcctggattaaagggtgaaaatggtcttccaggcgaaaatggagctcctggacccatgggtccaagaggggctcctggtgagcgaggacggccaggacttcctggggctgcaggtgctcggggtaatgacggtgctcgaggcagtgatggtcaaccaggccctcctggtcctcctggaactgccggattccctggatcccctggtgctaagggtgaagttggacctgcagggtctcctggttcaaatggtgcccctggacaaagaggagaacctggacctcagggacacgctggtgctcaaggtcctcctggccctcctgggattaatggtagtcctggtggtaaaggcgaaatgggtcccgctggcattcctggagctcctggactgatgggagcccggggtcctccaggaccagccggtgctaatggtgctcctggactgcgaggtggtgcaggtgagcctggtaagaatggtgccaaaggagagcccggaccacgtggtgaacgcggtgaggctggtattccaggtgttccaggagctaaaggcgaagatggcaaggatggatcacctggagaacctggtgcaaatgggcttccaggagctgcaggagaaaggggtgcccctgggttccgaggacctgctggaccaaatggcatcccaggagaaaagggtcctgctggagagcgtggtgctccaggccctgcagggcccagaggagctgctggagaacctggcagagatggcgtccctggaggtccaggaatgaggggcatgcccggaagtccaggaggaccaggaagtgatgggaaaccagggcctcccggaagtcaaggagaaagtggtcgaccaggtcctcctgggccatctggtccccgaggtcagcctggtgtcatgggcttccccggtcctaaaggaaatgatggtgctcctggtaagaatggagaacgaggtggccctggaggacctggccctcagggtcctcctggaaagaatggtgaaactggacctcagggacccccagggcctactgggcctggtggtgacaaaggagacacaggaccccctggtccacaaggattacaaggcttgcctggtacaggtggtcctccaggagaaaatggaaaacctggggaaccaggtccaaagggtgatgccggtgcacctggagctccaggaggcaagggtgatgctggtgcccctggtgaacgtggacctcctggattggcaggggccccaggacttagaggtggagctggtccccctggtcccgaaggaggaaagggtgctgctggtcctcctgggccacctggtgctgctggtactcctggtctgcaaggaatgcctggagaaagaggaggtcttggaagtcctggtccaaagggtgacaagggtgaaccaggcggtccaggtgctgatggtgtcccagggaaagatggcccaaggggtcctactggtcctattggtcctcctggcccagctggccagcctggagataagggtgaaggtggtgcccccggacttccaggtatagctggacctcgtggtagccctggtgagagaggtgaaactggccctccaggacctgctggtttccctggtgctcctggacagaatggtgaacctggtggtaaaggagaaagaggggctccgggtgagaaaggtgaaggaggccctcctggagttgcaggaccccctggaggttctggacctgctggtcctcctggtccccaaggtgtcaaaggtgaacgtggcagtcctggtggacctggtgctgctggcttccctggtgctcgtggtcttcctggtcctcctggtagtaatggtaacccaggacccccaggtcccagcggttctccaggcaaggatgggcccccaggtcctgcgggtaacactggtgctcctggcagccctggagtgtctggaccaaaaggtgatgctggccaaccaggagagaagggatcgcctggtgcccagggcccaccaggagctccaggcccacttgggattgctgggatcactggagcacggggtcttgcaggaccaccaggcatgccaggtcctaggggaagccctggccctcagggtgtcaagggtgaaagtgggaaaccaggagctaacggtctcagtggagaacgtggtccccctggaccccagggtcttcctggtctggctggtacagctggtgaacctggaagagatggaaaccctggatcagatggtcttccaggccgagatggatctcctggtggcaagggtgatcgtggtgaaaatggctctcctggtgcccctggcgctcctggtcatccaggcccacctggtcctgtcggtccagctggaaagagtggtgacagaggagaaagtggccctgctggccctgctggtgctcccggtcctgctggttcccgaggtgctcctggtcctcaaggcccacgtggtgacaaaggtgaaacaggtgaacgtggagctgctggcatcaaaggacatcgaggattccctggtaatccaggtgccccaggttctccaggccctgctggtcagcagggtgcaatcggcagtccaggacctgcaggccccagaggacctgttggacccagtggacctcctggcaaagatggaaccagtggacatccaggtcccattggaccaccagggcctcgaggtaacagaggtgaaagaggatctgagggctccccaggccacccagggcaaccaggccctcctggacctcctggtgcccctggtccttgctgtggtggtgttggagccgctgccattgctgggattggaggtgaaaaagctggcggttttgccccgtattatggagatgaaccaatggatttcaaaatcaacaccgatgagattatgacttcactcaagtctgttaatggacaaatagaaagcctcattagtcctgatggttctcgtaaaaaccccgctagaaactgcagagacctgaaattctgccatcctgaactcaagagtggagaatactgggttgaccctaaccaaggatgcaaattggatgctatcaaggtattctgtaatatggaaactggggaaacatgcataagtgccaatcctttgaatgttccacggaaacactggtggacagattctagtgctgagaagaaacacgtttggtttggagagtccatggatggtggttttcagtttagctacggcaatcctgaacttcctgaagatgtccttgatgtgcagctggcattccttcgacttctctccagccgagcttcccagaacatcacatatcactgcaaaaatagcattgcatacatggatcaggccagtggaaatgtaaagaaggccctgaagctgatggggtcaaatgaaggtgaattcaaggctgaaggaaatagcaaattcacctacacagttctggaggatggttgcacgaaacacactggggaatggagcaaaacagtctttgaatatcgaacacgcaaggctgtgagactacctattgtagatattgcaccctatgacattggtggtcctgatcaagaatttggtgtggacgttggccctgtttgctttttataaaccaaactctatctgaaatcccaacaaaaaaaatttaactccatatgtgttcctcttgttctaatcttgtcaaccagtgcaagtgaccgacaaaattccagttatttatttccaaaatgtttggaaacagtataatttgacaaagaaaaatgatacttctctttttttgctgttccaccaaatacaattcaaatgctttttgttttatttttttaccaattccaatttcaaaatgtctcaatggtgctataataaataaacttcaacactctttatgataacaacactgtgttatattctttgaatcctagcccatctgcagagcaatgactgtgctcaccagtaaaagataacctttctttctgaaatagtcaaatacgaaattagaaaagccctccctattttaactacctcaactggtcagaaacacagattgtattctatgagtcccagaagatgaaaaaaattttatacgttgataaaacttataaatttcattgattaatctcctggaagattggtttaaaaagaaaagtgtaatgcaagaatttaaagaaatatttttaaagccacaattattttaatattggatatcaactgcttgtaaaggtgctcctcttttttcttgtcattgctggtcaagattactaatatttgggaaggctttaaagacgcatgttatggtgctaatgtactttcacttttaaactctagatcagaattgttgacttgcattcagaacataaatgcacaaaatctgtacatgtctcccatcagaaagattcattggcatgccacaggggattctcctccttcatcctgtaaaggtcaacaataaaaaccaaattatggggctgcttttgtcacactagcatagagaatgtgttgaaatttaactttgtaagcttgtatgtggttgttgatcttttttttccttacagacacccataataaaatatcatattaaaattc

SEQ ID NO: 10 - DNA, 9169 bp, Homo sapiens
gatgacgctgcggcttctggtggccgcgctctgcgccgggatcctggcagaggcgccccgagtgcgagcccagcacagggagagagtgacctgcacgcgcctttacgccgctgacattgtgttcttactggatggctcctcatccattggccgcagcaatttccgcgaggtccgcagctttctcgaagggctggtgctgcctttctctggagcagccagtgcacagggtgtgcgctttgccacagtgcagtacagcgatgacccacggacagagttcggcctggatgcacttggctctgggggtgatgtgatccgcgccatccgtgagcttagctacaaggggggcaacactcgcacaggggctgcaattctccatgtggctgaccatgtcttcctgccccagctggcccgacctggtgtccccaaggtctgcatcctgatcacagacgggaagtcccaggacctggtggacacagctgcccaaaggctgaaggggcagggggtcaagctatttgctgtggggatcaagaatgctgaccctgaggagctgaagcgagttgcctcacagcccaccagtgacttcttcttcttcgtcaatgacttcagcatcttgaggacactactgcccctcgtttcccggagagtgtgcacgactgctggtggcgtgcctgtgacccgacctccggatgactcgacctctgctccacgagacctggtgctgtctgagccaagcagccaatccttgagagtacagtggacagcggccagtggccctgtgactggctacaaggtccagtacactcctctgacggggctgggacagccactgccgagtgagcggcaggaggtgaacgtcccagctggtgagaccagtgtgcggctgcggggtctccggccactgaccgagtaccaagtgactgtgattgccctctacgccaacagcatcggggaggctgtgagcgggacagctcggaccactgccctagaagggccggaactgaccatccagaataccacagcccacagcctcctggtggcctggcggagtgtgccaggtgccactggctaccgtgtgacatggcgggtcctcagtggtgggcccacacagcagcaggagctgggccctgggcagggttcagtgttgctgcgtgacttggagcctggcacggactatgaggtgaccgtgagcaccctatttggccgcagtgtggggcccgccacttccctgatggctcgcactgacgcttctgttgagcagaccctgcgcccggtcatcctgggccccacatccatcctcctttcctggaacttggtgcctgaggcccgtggctaccggttggaatggcggcgtgagactggcttggagccaccgcagaaggtggtactgccctctgatgtgacccgctaccagttggatgggctgcagccgggcactgagtaccgcctcacactctacactctgctggagggccacgaggtggccacccctgcaaccgtggttcccactggaccagagctgcctgtgagccctgtaacagacctgcaagccaccgagctgcccgggcagcgggtgcgagtgtcctggagcccagtccctggtgccacccagtaccgcatcattgtgcgcagcacccagggggttgagcggaccctggtgcttcctgggagtcagacagcattcgacttggatgacgttcaggctgggcttagctacactgtgcgggtgtctgctcgagtgggtccccgtgagggcagtgccagtgtcctcactgtccgccgggagccggaaactccacttgctgttccagggctgcgggttgtggtgtcagatgcaacgcgagtgagggtggcctggggacccgtccctggagccagtggatttcggattagctggagcacaggcagtggtccggagtccagccagacactgcccccagactctactgccacagacatcacagggctgcagcctggaaccacctaccaggtggctgtgtcggtactgcgaggcagagaggagggccctgctgcagtcatcgtggctcgaacggacccactgggcccagtgaggacggtccatgtgactcaggccagcagctcatctgtcaccattacctggaccagggttcctggcgccacaggatacagggtttcctggcactcagcccacggcccagagaaatcccagttggtttctggggaggccacggtggctgagctggatggactggagccagatactgagtatacggtgcatgtgagggcccatgtggctggcgtggatgggccccctgcctctgtggttgtgaggactgcccctgagcctgtgggtcgtgtgtcgaggctgcagatcctcaatgcttccagcgacgttctacggatcacctgggtaggggtcactggagccacagcttacagactggcctggggccggagtgaaggcggccccatgaggcaccagatactcccaggaaacacagactctgcagagatccggggtctcgaaggtggagtcagctactcagtgcgagtgactgcacttgtcggggaccgcgagggcacacctgtctccattgttgtcactacgccgcctgaggctccgccagccctggggacgcttcacgtggtgcagcgcggggagcactcgctgaggctgcgctgggagccggtgcccagagcgcagggcttccttctgcactggcaacctgagggtggccaggaacagtcccgggtcctggggcccgagctcagcagctatcacctggacgggctggagccagcgacacagtaccgcgtgaggctgagtgtcctagggccagctggagaagggccctctgcagaggtgactgcgcgcactgagtcacctcgtgttccaagcattgaactacgtgtggtggacacctcgatcgactcggtgactttggcctggactccagtgtccagggcatccagctacatcctatcctggcggccactcagaggccctggccaggaagtgcctgggtccccgcagacacttccagggatctcaagctcccagcgggtgacagggctagagcctggcgtctcttacatcttctccctgacgcctgtcctggatggtgtgcggggtcctgaggcatctgtcacacagacgccagtgtgcccccgtggcctggcggatgtggtgttcctaccacatgccactcaagacaatgctcaccgtgcggaggctacgaggagggtcctggagcgtctggtgttggcacttgggcctcttgggccacaggcagttcaggttggcctgctgtcttacagtcatcggccctccccactgttcccactgaatggctcccatgaccttggcattatcttgcaaaggatccgtgacatgccctacatggacccaagtgggaacaacctgggcacagccgtggtcacagctcacagatacatgttggcaccagatgctcctgggcgccgccagcacgtaccaggggtgatggttctgctagtggatgaacccttgagaggtgacatattcagccccatccgtgaggcccaggcttctgggcttaatgtggtgatgttgggaatggctggagcggacccagagcagctgcgtcgcttggcgccgggtatggactctgtccagaccttcttcgccgtggatgatgggccaagcctggaccaggcagtcagtggtctggccacagccctgtgtcaggcatccttcactactcagccccggccagagccctgcccagtgtattgtccaaagggccagaagggggaacctggagagatgggcctgagaggacaagttgggcctcctggcgaccctggcctcccgggcaggaccggtgctcccggcccccaggggccccctggaagtgccactgccaagggcgagaggggcttccctggagcagatgggcgtccaggcagccctggccgcgccgggaatcctgggacccctggagcccctggcctaaagggctctccagggttgcctggccctcgtggggacccgggagagcgaggacctcgaggcccaaagggggagccgggggctcccggacaagtcatcggaggtgaaggacctgggcttcctgggcggaaaggggaccctggaccatcgggcccccctggacctcgtggaccactgggggacccaggaccccgtggccccccagggcttcctggaacagccatgaagggtgacaaaggcgatcgtggggagcggggtccccctggaccaggtgaaggtggcattgctcctggggagcctgggctgccgggtcttcccggaagccctggaccccaaggccccgttggcccccctggaaagaaaggagaaaaaggtgactctgaggatggagctccaggcctcccaggacaacctgggtctccgggtgagcagggcccacggggacctcctggagctattggccccaaaggtgaccggggctttccagggcccctgggtgaggctggagagaagggcgaacgtggacccccaggcccagcgggatcccgggggctgccaggggttgctggacgtcctggagccaagggtcctgaagggccaccaggacccactggccgccaaggagagaagggggagcctggtcgccctggggaccctgcagtggtgggacctgctgttgctggacccaaaggagaaaagggagatgtggggcccgctgggcccagaggagctaccggagtccaaggggaacggggcccacccggcttggttcttcctggagaccctggccccaagggagaccctggagaccggggtcccattggccttactggcagagcaggacccccaggtgactcagggcctcctggagagaagggagaccctgggcggcctggccccccaggacctgttggcccccgaggacgagatggtgaagttggagagaaaggtgacgagggtcctccgggtgacccgggtttgcctggaaaagcaggcgagcgtggccttcggggggcacctggagttcgggggcctgtgggtgaaaagggagaccagggagatcctggagaggatggacgaaatggcagccctggatcatctggacccaagggtgaccgtggggagccgggtcccccaggacccccgggacggctggtagacacaggacctggagccagagagaagggagagcctggggaccgcggacaagagggtcctcgagggcccaagggtgatcctggcctccctggagcccctggggaaaggggcattgaagggtttcggggacccccaggcccacagggggacccaggtgtccgaggcccagcaggagaaaagggtgaccggggtccccctgggctggatggccggagcggactggatgggaaaccaggagccgctgggccctctgggccgaatggtgctgcaggcaaagctggggacccagggagagacgggcttccaggcctccgtggagaacagggcctccctggcccctctggtccccctggattaccgggaaagccaggcgaggatggcaaacctggcctgaatggaaaaaacggagaacctggggaccctggagaagacgggaggaagggagagaaaggagattcaggcgcctctgggagagaaggtcgtgatggccccaagggtgagcgtggagctcctggtatccttggaccccaggggcctccaggcctcccagggccagtgggccctcctggccagggttttcctggtgtcccaggaggcacgggccccaagggtgaccgtggggagactggatccaaaggggagcagggcctccctggagagcgtggcctgcgaggagagcctggaagtgtgccgaatgtggatcggttgctggaaactgctggcatcaaggcatctgccctgcgggagatcgtggagacctgggatgagagctctggtagcttcctgcctgtgcccgaacggcgtcgaggccccaagggggactcaggcgaacagggccccccaggcaaggagggccccatcggctttcctggagaacgcgggctgaagggcgaccgtggagaccctggccctcaggggccacctggtctggcccttggggagaggggcccccccgggccttccggccttgccggggagcctggaaagcctggtattcccgggctcccaggcagggctgggggtgtgggagaggcaggaaggccaggagagaggggagaacggggagagaaaggagaacgtggagaacagggcagagatggccctcctggactccctggaacccctgggccccccggaccccctggccccaaggtgtctgtggatgagccaggtcctggactctctggagaacagggaccccctggactcaagggtgctaagggggagccgggcagcaatggtgaccaaggtcccaaaggagacaggggtgtgccaggcatcaaaggagaccggggagagcctggaccgaggggtcaggacggcaacccgggtctaccaggagagcgtggtatggctgggcctgaagggaagccgggtctgcagggtccaagaggcccccctggcccagtgggtggtcatggagaccctggaccacctggtgccccgggtcttgctggccctgcaggaccccaaggaccttctggcctgaagggggagcctggagagacaggacctccaggacggggcctgactggacctactggagctgtgggacttcctggaccccccggcccttcaggccttgtgggtccacaggggtctccaggtttgcctggacaagtgggggagacagggaagccgggagccccaggtcgagatggtgccagtggaaaagatggagacagagggagccctggtgtgccagggtcaccaggtctgcctggccctgtcggacctaaaggagaacctggccccacgggggcccctggacaggctgtggtcgggctccctggagcaaagggagagaagggagcccctggaggccttgctggagacctggtgggtgagccgggagccaaaggtgaccgaggactgccagggccgcgaggcgagaagggtgaagctggccgtgcaggggagcccggagaccctggggaagatggtcagaaaggggctccaggacccaaaggtttcaagggtgacccaggagtcggggtcccgggctcccctgggcctcctggccctccaggtgtgaagggagatctgggcctccctggcctgcccggtgctcctggtgttgttgggttcccgggtcagacaggccctcgaggagagatgggtcagccaggccctagtggagagcggggtctggcaggccccccagggagagaaggaatcccaggacccctggggccacctggaccaccggggtcagtgggaccacctggggcctctggactcaaaggagacaagggagaccctggagtagggctgcctgggccccgaggcgagcgtggggagccaggcatccggggtgaagatggccgccccggccaggagggaccccgaggactcacggggccccctggcagcaggggagagcgtggggagaagggtgatgttgggagtgcaggactaaagggtgacaagggagactcagctgtgatcctggggcctccaggcccacggggtgccaagggggacatgggtgaacgagggcctcggggcttggatggtgacaaaggacctcggggagacaatggggaccctggtgacaagggcagcaagggagagcctggtgacaagggctcagccgggttgccaggactgcgtggactcctgggaccccagggtcaacctggtgcagcagggatccctggtgacccgggatccccaggaaaggatggagtgcctggtatccgaggagaaaaaggagatgttggcttcatgggtccccggggcctcaagggtgaacggggagtgaagggagcctgtggccttgatggagagaagggagacaagggagaagctggtcccccaggccgccccgggctggcaggacacaaaggagagatgggggagcctggtgtgccgggccagtcgggggcccctggcaaggagggcctgatcggtcccaagggtgaccgaggctttgacgggcagccaggccccaagggtgaccagggcgagaaaggggagcggggaaccccaggaattgggggcttcccaggccccagtggaaatgatggctctgctggtcccccagggccacctggcagtgttggtcccagaggccccgaaggacttcagggccagaagggtgagcgaggtccccccggagagagagtggtgggggctcctggggtccctggagctcctggcgagagaggggagcaggggcggccagggcctgccggtcctcgaggcgagaagggagaagctgcactgacggaggatgacatccggggctttgtgcgccaagagatgagtcagcactgtgcctgccagggccagttcatcgcatctggatcacgacccctccctagttatgctgcagacactgccggctcccagctccatgctgtgcctgtgctccgcgtctctcatgcagaggaggaagagcgggtaccccctgaggatgatgagtactctgaatactccgagtattctgtggaggagtaccaggaccctgaagctccttgggatagtgatgacccctgttccctgccactggatgagggctcctgcactgcctacaccctgcgctggtaccatcgggctgtgacaggcagcacagaggcctgtcacccttttgtctatggtggctgtggagggaatgccaaccgttttgggacccgtgaggcctgcgagcgccgctgcccaccccgggtggtccagagccaggggacaggtactgcccaggactgaggcccagataatgagctgagattcagcatcccctggaggagtcggggtctcagcagaaccccactgtccctccccttggtgctagaggcttgtgtgcacgtgagcgtgcgtgtgcacgtccgttatttcagtgacttggtcccgtgggtctagccttcccccctgtggacaaacccccattgtggctcctgccaccctggcagatgactcactgtgggggggtggctgtgggcagtgagcggatgtgactggcgtctgacccgccccttgacccaagcctgtgatgacatggtgctgattctggggggcattaaagctgctgttttaaaaggc

SEQ ID NO: 11 - DNA, 2358 bp, Homo sapiens
aaactcacacaacaactcttccccgctgagaggagacagccagtgcgactccaccctccagctcgacggcagccgccccggccgacagccccgagacgacagcccggcgcgtcccggtccccacctccgaccaccgccagcgctccaggccccgccgctccccgctcgccgccaccgcgccctccgctccgcccgcagtgccaaccatgaccgccgccagtatgggccccgtccgcgtcgccttcgtggtcctcctcgccctctgcagccggccggccgtcggccagaactgcagcgggccgtgccggtgcccggacgagccggcgccgcgctgcccggcgggcgtgagcctcgtgctggacggctgcggctgctgccgcgtctgcgccaagcagctgggcgagctgtgcaccgagcgcgacccctgcgacccgcacaagggcctcttctgtgacttcggctccccggccaaccgcaagatcggcgtgtgcaccgccaaagatggtgctccctgcatcttcggtggtacggtgtaccgcagcggagagtccttccagagcagctgcaagtaccagtgcacgtgcctggacggggcggtgggctgcatgcccctgtgcagcatggacgttcgtctgcccagccctgactgccccttcccgaggagggtcaagctgcccgggaaatgctgcgaggagtgggtgtgtgacgagcccaaggaccaaaccgtggttgggcctgccctcgcggcttaccgactggaagacacgtttggcccagacccaactatgattagagccaactgcctggtccagaccacagagtggagcgcctgttccaagacctgtgggatgggcatctccacccgggttaccaatgacaacgcctcctgcaggctagagaagcagagccgcctgtgcatggtcaggccttgcgaagctgacctggaagagaacattaagaagggcaaaaagtgcatccgtactcccaaaatctccaagcctatcaagtttgagctttctggctgcaccagcatgaagacataccgagctaaattctgtggagtatgtaccgacggccgatgctgcaccccccacagaaccaccaccctgccggtggagttcaagtgccctgacggcgaggtcatgaagaagaacatgatgttcatcaagacctgtgcctgccattacaactgtcccggagacaatgacatctttgaatcgctgtactacaggaagatgtacggagacatggcatgaagccagagagtgagagacattaactcattagactggaacttgaactgattcacatctcatttttccgtaaaaatgatttcagtagcacaagttatttaaatctgtttttctaactgggggaaaagattcccacccaattcaaaacattgtgccatgtcaaacaaatagtctatcaaccccagacactggtttgaagaatgttaagacttgacagtggaactacattagtacacagcaccagaatgtatattaaggtgtggctttaggagcagtgggagggtaccagcagaaaggttagtatcatcagatagcatcttatacgagtaatatgcctgctatttgaagtgtaattgagaaggaaaattttagcgtgctcactgacctgcctgtagccccagtgacagctaggatgtgcattctccagccatcaagagactgagtcaagttgttccttaagtcagaacagcagactcagctctgacattctgattcgaatgacactgttcaggaatcggaatcctgtcgattagactggacagcttgtggcaagtgaatttgcctgtaacaagccagattttttaaaatttatattgtaaatattgtgtgtgtgtgtgtgtgtgtatatatatatatatgtacagttatctaagttaatttaaagttgtttgtgcctttttatttttgtttttaatgctttgatatttcaatgttagcctcaatttctgaacaccataggtagaatgtaaagcttgtctgatcgttcaaagcatgaaatggatacttatatggaaattctgctcagatagaatgacagtccgtcaaaacagattgtttgcaaaggggaggcatcagtgtccttggcaggctgatttctaggtaggaaatgtggtagcctcacttttaatgaacaaatggcctttattaaaaactgagtgactctatatagctgatcagttttttcacctggaagcatttgtttctactttgatatgactgtttttcggacagtttatttgttgagagtgtgaccaaaagttacatgtttgcacctttctagttgaaaataaagtgtatattttttctataaaaaaaaaaaaaaaaa

SEQ ID NO: 12 - DNA, 3256 bp, Homo sapiens
aggatacagcggcttctgcgcgacttataagagctccttgtgcggcgccattttaagcctctcggtctgtggcagcagcgttggcccggccccgggagcggagagcgaggggaggcggagacggaggaaggtctgaggagcagcttcagtccccgccgagccgccaccgcaggtcgaggacggtcggactcccgcggcgggaggagcctgttcccctgagggtatttgaagtataccatacaactgttttgaaaatccagcgtggacaatggctactcaagctgatttgatggagttggacatggccatggaaccagacagaaaagcggctgttagtcactggcagcaacagtcttacctggactctggaatccattctggtgccactaccacagctccttctctgagtggtaaaggcaatcctgaggaagaggatgtggatacctcccaagtcctgtatgagtgggaacagggattttctcagtccttcactcaagaacaagtagctgatattgatggacagtatgcaatgactcgagctcagagggtacgagctgctatgttccctgagacattagatgagggcatgcagatcccatctacacagtttgatgctgctcatcccactaatgtccagcgtttggctgaaccatcacagatgctgaaacatgcagttgtaaacttgattaactatcaagatgatgcagaacttgccacacgtgcaatccctgaactgacaaaactgctaaatgacgaggaccaggtggtggttaataaggctgcagttatggtccatcagctttctaaaaaggaagcttccagacacgctatcatgcgttctcctcagatggtgtctgctattgtacgtaccatgcagaatacaaatgatgtagaaacagctcgttgtaccgctgggaccttgcataacctttcccatcatcgtgagggcttactggccatctttaagtctggaggcattcctgccctggtgaaaatgcttggttcaccagtggattctgtgttgttttatgccattacaactctccacaaccttttattacatcaagaaggagctaaaatggcagtgcgtttagctggtgggctgcagaaaatggttgccttgctcaacaaaacaaatgttaaattcttggctattacgacagactgccttcaaattttagcttatggcaaccaagaaagcaagctcatcatactggctagtggtggaccccaagctttagtaaatataatgaggacctatacttacgaaaaactactgtggaccacaagcagagtgctgaaggtgctatctgtctgctctagtaataagccggctattgtagaagctggtggaatgcaagctttaggacttcacctgacagatccaagtcaacgtcttgttcagaactgtctttggactctcaggaatctttcagatgctgcaactaaacaggaagggatggaaggtctccttgggactcttgttcagcttctgggttcagatgatataaatgtggtcacctgtgcagctggaattctttctaacctcacttgcaataattataagaacaagatgatggtctgccaagtgggtggtatagaggctcttgtgcgtactgtccttcgggctggtgacagggaagacatcactgagcctgccatctgtgctcttcgtcatctgaccagccgacaccaagaagcagagatggcccagaatgcagttcgccttcactatggactaccagttgtggttaagctcttacacccaccatcccactggcctctgataaaggctactgttggattgattcgaaatcttgccctttgtcccgcaaatcatgcacctttgcgtgagcagggtgccattccacgactagttcagttgcttgttcgtgcacatcaggatacccagcgccgtacgtccatgggtgggacacagcagcaatttgtggagggggtccgcatggaagaaatagttgaaggttgtaccggagcccttcacatcctagctcgggatgttcacaaccgaattgttatcagaggactaaataccattccattgtttgtgcagctgctttattctcccattgaaaacatccaaagagtagctgcaggggtcctctgtgaacttgctcaggacaaggaagctgcagaagctattgaagctgagggagccacagctcctctgacagagttacttcactctaggaatgaaggtgtggcgacatatgcagctgctgttttgttccgaatgtctgaggacaagccacaagattacaagaaacggctttcagttgagctgaccagctctctcttcagaacagagccaatggcttggaatgagactgctgatcttggacttgatattggtgcccagggagaaccccttggatatcgccaggatgatcctagctatcgttcttttcactctggtggatatggccaggatgccttgggtatggaccccatgatggaacatgagatgggtggccaccaccctggtgctgactatccagttgatgggctgccagatctggggcatgcccaggacctcatggatgggctgcctccaggtgacagcaatcagctggcctggtttgatactgacctgtaaatcatcctttaggagtaacaatacaaatggattttgggagtgactcaagaagtgaagaatgcacaagaatggatcacaagatggaatttatcaaaccctagccttgcttgttaaatttttttttttttttttttaagaatatctgtaatggtactgactttgcttgctttgaagtagctctttttttttttttttttttttttttgcagtaactgttttttaagtctctcgtagtgttaagttatagtgaatactgctacagcaatttctaatttttaagaattgagtaatggtgtagaacactaattcataatcactctaattaattgtaatctgaataaagtgtaacaattgtgtagcctttttgtataaaatagacaaatagaaaatggtccaattagtttcctttttaatatgcttaaaataagcaggtggatctatttcatgtttttgatcaaaaactatttgggatatgtatgggtagggtaaatcagtaagaggtgttatttggaaccttgttttggacagtttaccagttgccttttatcccaaagttgttgtaacctgctgtgatacgatgcttcaagagaaaatgcggttataaaaaatggttcagaattaaacttttaattcattcgattg

SEQ ID NO: 13 - DNA, 1424 bp, Homo sapiens
agcagtcagccggccggagacagagacttcacgactcccagtctcctcctcgccgcggccgccgcctcctccttctctcctcctcctcttcctcctcctccctcgctcccacagccatgtctgcttagaccagagcagccccacagccaactagggcagctgccgccgccacaacagcaaggacagccgctgccgccgcccgtgagcgatgacaggagtgtttgacagaagggtccccagcatccgatccggcgacttccaagctccgttccagacgtccgcagctatgcaccatccgtctcaggaatcgccaactttgcccgagtcttcagctaccgattctgactactacagccctacggggggagccccgcacggctactgctctcctacctcggcttcctatggcaaagctctcaacccctaccagtatcagtatcacggcgtgaacggctccgccgggagctacccagccaaagcttatgccgactatagctacgctagctcctaccaccagtacggcggcgcctacaaccgcgtcccaagcgccaccaaccagccagagaaagaagtgaccgagcccgaggtgagaatggtgaatggcaaaccaaagaaagttcgtaaacccaggactatttattccagctttcagctggccgcattacagagaaggtttcagaagactcagtacctcgccttgccggaacgcgccgagctggccgcctcgctgggattgacacaaacacaggtgaaaatctggtttcagaacaaaagatccaagatcaagaagatcatgaaaaacggggagatgcccccggagcacagtcccagctccagcgacccaatggcgtgtaactcgccgcagtctccagcggtgtgggagccccagggctcgtcccgctcgctcagccaccaccctcatgcccaccctccgacctccaaccagtccccagcgtccagctacctggagaactctgcatcctggtacacaagtgcagccagctcaatcaattcccacctgccgccgccgggctccttacagcacccgctggcgctggcctccgggacactctattagatgggctgctctctcttactctcttttttgggactactgtgttttgctgttctagaaaatcataaagaaaggaattcatatggggaagttcggaaaactgaaaaagattcatgtgtaaagcttttttttgcatgtaagttattgcatttcaaaagaccccccctttttttacagaggactttttttgcgcaactgtggacactttcaatggtgccttgaaatctatgacctcaacttttcaaaagacttttttcaatgttattttagccatgtaaataagtgtagatagaggaattaaactgtatattctggataaataaaattatttcgaccatgaaaagcggaa

SEQ ID NO: 14 - DNA, 2109 bp, Homo sapiens
ggagctgtttacccccactctaataggggttcaatataaaaagccggcagagagctgtccaagtcagacgcgcctctgcatctgcgccaggcgaacgggtcctgcgcctcctgcagtcccagctctccaccgccgcgtgcgcctgcagacgctccgctcgctgccttctctcctggcaggcgctgccttttctccccgttaaaagggcacttgggctgaaggatcgctttgagatctgaggaacccgcagcgctttgagggacctgaagctgtttttcttcgttttcctttgggttcagtttgaacgggaggtttttgatccctttttttcagaatggattatttgctcatgattttctctctgctgtttgtggcttgccaaggagctccagaaacagtcttaggcgctgagctcagcgcggtgggtgagaacggcggggagaaacccactcccagtccaccctggcggctccgccggtccaagcgctgctcctgctcgtccctgatggataaagagtgtgtctacttctgccacctggacatcatttgggtcaacactcccgagcacgttgttccgtatggacttggaagccctaggtccaagagagccttggagaatttacttcccacaaaggcaacagaccgtgaaaatagatgccaatgtgctagccaaaaagacaagaagtgctggaatttttgccaagcaggaaaagaactcagggctgaagacattatggagaaagactggaataatcataagaaaggaaaagactgttccaagcttgggaaaaagtgtatttatcagcagttagtgagaggaagaaaaatcagaagaagttcagaggaacacctaagacaaaccaggtcggagaccatgagaaacagcgtcaaatcatcttttcatgatcccaagctgaaaggcaagccctccagagagcgttatgtgacccacaaccgagcacattggtgacagaccttcggggcctgtctgaagccatagcctccacggagagccctgtggccgactctgcactctccaccctggctgggatcagagcaggagcatcctctgctggttcctgactggcaaaggaccagcgtcctcgttcaaaacattccaagaaaggttaaggagttcccccaaccatcttcactggcttccatcagtggtaactgctttggtctcttctttcatctggggatgacaatggacctctcagcagaaacacacagtcacattcgaattcgggtggcatcctccggagagagagagaggaaggagattccacacaggggtggagtttctgacgaaggtcctaagggagtgtttgtgtctgactcaggcgcctggcacatttcagggagaaactccaaagtccacacaaagattttctaaggaatgcacaaattgaaaacacactcaaaagacaaacatgcaagtaaagaaaaaaaaaagaaagacttttgtttaaatttgtaaaatgcaaaactgaatgaaactgttactaccataaatcaggatatgtttcatgaatatgagtctacctcacctatattgcactctggcagaagtatttcccacatttaattattgcctccccaaactcttcccacccctgctgccccttcctccatcccccatactaaatcctagcctcgtagaagtctggtctaatgtgtcagcagtagatataatattttcatggtaatctactagctctgatccataagaaaaaaaagatcattaaatcaggagattccctgtccttgatttttggagacacaatggtatagggttgtttatgaaatatattgaaaagtaagtgtttgttacgctttaaagcagtaaaattattttcctttatataaccggctaatgaaagaggttggattgaattttgatgtacttatttttttatagatatttatattcaaacaatttattccttatatttaccatgttaaatatctgtttgggcaggccatattggtctatgtatttttaaaatatgtatttctaaatgaaattgagaacatgctttgttttgcctgtcaaggtaatgactttagaaaataaatatttttttccttactgtaaaaaaaaaaaaa

SEQ ID NO: 15 - DNA, 8272 bp, Homo sapiens
gcccgcgccggctgtgctgcacagggggaggagagggaaccccaggcgcgagcgggaagaggggacctgcagccacaacttctctggtcctctgcatcccttctgtccctccacccgtccccttccccaccctctggcccccaccttcttggaggcgacaacccccgggaggcattagaagggatttttcccgcaggttgcgaagggaagcaaacttggtggcaacttgcctcccggtgcgggcgtctctcccccaccgtctcaacatgcttaggggtccggggcccgggctgctgctgctggccgtccagtgcctggggacagcggtgccctccacgggagcctcgaagagcaagaggcaggctcagcaaatggttcagccccagtccccggtggctgtcagtcaaagcaagcccggttgttatgacaatggaaaacactatcagataaatcaacagtgggagcggacctacctaggcaatgcgttggtttgtacttgttatggaggaagccgaggttttaactgcgagagtaaacctgaagctgaagagacttgctttgacaagtacactgggaacacttaccgagtgggtgacacttatgagcgtcctaaagactccatgatctgggactgtacctgcatcggggctgggcgagggagaataagctgtaccatcgcaaaccgctgccatgaagggggtcagtcctacaagattggtgacacctggaggagaccacatgagactggtggttacatgttagagtgtgtgtgtcttggtaatggaaaaggagaatggacctgcaagcccatagctgagaagtgttttgatcatgctgctgggacttcctatgtggtcggagaaacgtgggagaagccctaccaaggctggatgatggtagattgtacttgcctgggagaaggcagcggacgcatcacttgcacttctagaaatagatgcaacgatcaggacacaaggacatcctatagaattggagacacctggagcaagaaggataatcgaggaaacctgctccagtgcatctgcacaggcaacggccgaggagagtggaagtgtgagaggcacacctctgtgcagaccacatcgagcggatctggccccttcaccgatgttcgtgcagctgtttaccaaccgcagcctcacccccagcctcctccctatggccactgtgtcacagacagtggtgtggtctactctgtggggatgcagtggctgaagacacaaggaaataagcaaatgctttgcacgtgcctgggcaacggagtcagctgccaagagacagctgtaacccagacttacggtggcaactcaaatggagagccatgtgtcttaccattcacctacaatggcaggacgttctactcctgcaccacagaagggcgacaggacggacatctttggtgcagcacaacttcgaattatgagcaggaccagaaatactctttctgcacagaccacactgttttggttcagactcgaggaggaaattccaatggtgccttgtgccacttccccttcctatacaacaaccacaattacactgattgcacttctgagggcagaagagacaacatgaagtggtgtgggaccacacagaactatgatgccgaccagaagtttgggttctgccccatggctgcccacgaggaaatctgcacaaccaatgaaggggtcatgtaccgcattggagatcagtgggataagcagcatgacatgggtcacatgatgaggtgcacgtgtgttgggaatggtcgtggggaatggacatgcattgcctactcgcagcttcgagatcagtgcattgttgatgacatcacttacaatgtgaacgacacattccacaagcgtcatgaagaggggcacatgctgaactgtacatgcttcggtcagggtcggggcaggtggaagtgtgatcccgtcgaccaatgccaggattcagagactgggacgttttatcaaattggagattcatgggagaagtatgtgcatggtgtcagataccagtgctactgctatggccgtggcattggggagtggcattgccaacctttacagacctatccaagctcaagtggtcctgtcgaagtatttatcactgagactccgagtcagcccaactcccaccccatccagtggaatgcaccacagccatctcacatttccaagtacattctcaggtggagacctaaaaattctgtaggccgttggaaggaagctaccataccaggccacttaaactcctacaccatcaaaggcctgaagcctggtgtggtatacgagggccagctcatcagcatccagcagtacggccaccaagaagtgactcgctttgacttcaccaccaccagcaccagcacacctgtgaccagcaacaccgtgacaggagagacgactcccttttctcctcttgtggccacttctgaatctgtgaccgaaatcacagccagtagctttgtggtctcctgggtctcagcttccgacaccgtgtcgggattccgggtggaatatgagctgagtgaggagggagatgagccacagtacctggatcttccaagcacagccacttctgtgaacatccctgacctgcttcctggccgaaaatacattgtaaatgtctatcagatatctgaggatggggagcagagtttgatcctgtctacttcacaaacaacagcgcctgatgcccctcctgacccgactgtggaccaagttgatgacacctcaattgttgttcgctggagcagaccccaggctcccatcacagggtacagaatagtctattcgccatcagtagaaggtagcagcacagaactcaaccttcctgaaactgcaaactccgtcaccctcagtgacttgcaacctggtgttcagtataacatcactatctatgctgtggaagaaaatcaagaaagtacacctgttgtcattcaacaagaaaccactggcaccccacgctcagatacagtgccctctcccagggacctgcagtttgtggaagtgacagacgtgaaggtcaccatcatgtggacaccgcctgagagtgcagtgaccggctaccgtgtggatgtgatccccgtcaacctgcctggcgagcacgggcagaggctgcccatcagcaggaacacctttgcagaagtcaccgggctgtcccctggggtcacctattacttcaaagtctttgcagtgagccatgggagggagagcaagcctctgactgctcaacagacaaccaaactggatgctcccactaacctccagtttgtcaatgaaactgattctactgtcctggtgagatggactccacctcgggcccagataacaggataccgactgaccgtgggccttacccgaagaggacagcccaggcagtacaatgtgggtccctctgtctccaagtacccactgaggaatctgcagcctgcatctgagtacaccgtatccctcgtggccataaagggcaaccaagagagccccaaagccactggagtctttaccacactgcagcctgggagctctattccaccttacaacaccgaggtgactgagaccaccattgtgatcacatggacgcctgctccaagaattggttttaagctgggtgtacgaccaagccagggaggagaggcaccacgagaagtgacttcagactcaggaagcatcgttgtgtccggcttgactccaggagtagaatacgtctacaccatccaagtcctgagagatggacaggaaagagatgcgccaattgtaaacaaagtggtgacaccattgtctccaccaacaaacttgcatctggaggcaaaccctgacactggagtgctcacagtctcctgggagaggagcaccaccccagacattactggttatagaattaccacaacccctacaaacggccagcagggaaattctttggaagaagtggtccatgctgatcagagctcctgcacttttgataacctgagtcccggcctggagtacaatgtcagtgtttacactgtcaaggatgacaaggaaagtgtccctatctctgataccatcatcccagctgttcctcctcccactgacctgcgattcaccaacattggtccagacaccatgcgtgtcacctgggctccacccccatccattgatttaaccaacttcctggtgcgttactcacctgtgaaaaatgaggaagatgttgcagagttgtcaatttctccttcagacaatgcagtggtcttaacaaatctcctgcctggtacagaatatgtagtgagtgtctccagtgtctacgaacaacatgagagcacacctcttagaggaagacagaaaacaggtcttgattccccaactggcattgacttttctgatattactgccaactcttttactgtgcactggattgctcctcgagccaccatcactggctacaggatccgccatcatcccgagcacttcagtgggagacctcgagaagatcgggtgccccactctcggaattccatcaccctcaccaacctcactccaggcacagagtatgtggtcagcatcgttgctcttaatggcagagaggaaagtcccttattgattggccaacaatcaacagtttctgatgttccgagggacctggaagttgttgctgcgacccccaccagcctactgatcagctgggatgctcctgctgtcacagtgagatattacaggatcacttacggagagacaggaggaaatagccctgtccaggagttcactgtgcctgggagcaagtctacagctaccatcagcggccttaaacctggagttgattataccatcactgtgtatgctgtcactggccgtggagacagccccgcaagcagcaagccaatttccattaattaccgaacagaaattgacaaaccatcccagatgcaagtgaccgatgttcaggacaacagcattagtgtcaagtggctgccttcaagttcccctgttactggttacagagtaaccaccactcccaaaaatggaccaggaccaacaaaaactaaaactgcaggtccagatcaaacagaaatgactattgaaggcttgcagcccacagtggagtatgtggttagtgtctatgctcagaatccaagcggagagagtcagcctctggttcagactgcagtaaccactattcctgcaccaactgacctgaagttcactcaggtcacacccacaagcctgagcgcccagtggacaccacccaatgttcagctcactggatatcgagtgcgggtgacccccaaggagaagaccggaccaatgaaagaaatcaaccttgctcctgacagctcatccgtggttgtatcaggacttatggtggccaccaaatatgaagtgagtgtctatgctcttaaggacactttgacaagcagaccagctcagggagttgtcaccactctggagaatgtcagcccaccaagaagggctcgtgtgacagatgctactgagaccaccatcaccattagctggagaaccaagactgagacgatcactggcttccaagttgatgccgttccagccaatggccagactccaatccagagaaccatcaagccagatgtcagaagctacaccatcacaggtttacaaccaggcactgactacaagatctacctgtacaccttgaatgacaatgctcggagctcccctgtggtcatcgacgcctccactgccattgatgcaccatccaacctgcgtttcctggccaccacacccaattccttgctggtatcatggcagccgccacgtgccaggattaccggctacatcatcaagtatgagaagcctgggtctcctcccagagaagtggtccctcggccccgccctggtgtcacagaggctactattactggcctggaaccgggaaccgaatatacaatttatgtcattgccctgaagaataatcagaagagcgagcccctgattggaaggaaaaagacagacgagcttccccaactggtaacccttccacaccccaatcttcatggaccagagatcttggatgttccttccacagttcaaaagacccctttcgtcacccaccctgggtatgacactggaaatggtattcagcttcctggcacttctggtcagcaacccagtgttgggcaacaaatgatctttgaggaacatggttttaggcggaccacaccgcccacaacggccacccccataaggcataggccaagaccatacccgccgaatgtaggtgaggaaatccaaattggtcacatccccagggaagatgtagactatcacctgtacccacacggtccgggactcaatccaaatgcctctacaggacaagaagctctctctcagacaaccatctcatgggccccattccaggacacttctgagtacatcatttcatgtcatcctgttggcactgatgaagaacccttacagttcagggttcctggaacttctaccagtgccactctgacaggcctcaccagaggtgccacctacaacatcatagtggaggcactgaaagaccagcagaggcataaggttcgggaagaggttgttaccgtgggcaactctgtcaacgaaggcttgaaccaacctacggatgactcgtgctttgacccctacacagtttcccattatgccgttggagatgagtgggaacgaatgtctgaatcaggctttaaactgttgtgccagtgcttaggctttggaagtggtcatttcagatgtgattcatctagatggtgccatgacaatggtgtgaactacaagattggagagaagtgggaccgtcagggagaaaatggccagatgatgagctgcacatgtcttgggaacggaaaaggagaattcaagtgtgaccctcatgaggcaacgtgttatgatgatgggaagacataccacgtaggagaacagtggcagaaggaatatctcggtgccatttgctcctgcacatgctttggaggccagcggggctggcgctgtgacaactgccgcagacctgggggtgaacccagtcccgaaggcactactggccagtcctacaaccagtattctcagagataccatcagagaacaaacactaatgttaattgcccaattgagtgcttcatgcctttagatgtacaggctgacagagaagattcccgagagtaaatcatctttccaatccagaggaacaagcatgtctctctgccaagatccatctaaactggagtgatgttagcagacccagcttagagttcttctttctttcttaagccctttgctctggaggaagttctccagcttcagctcaactcacagcttctccaagcatcaccctgggagtttcctgagggttttctcataaatgagggctgcacattgcctgttctgcttcgaagtattcaataccgctcagtattttaaatgaagtgattctaagatttggtttgggatcaataggaaagcatatgcagccaaccaagatgcaaatgttttgaaatgatatgaccaaaattttaagtaggaaagtcacccaaacacttctgctttcacttaagtgtctggcccgcaatactgtaggaacaagcatgatcttgttactgtgatattttaaatatccacagtactcactttttccaaatgatcctagtaattgcctagaaatatctttctcttacctgttatttatcaatttttcccagtatttttatacggaaaaaattgtattgaaaacacttagtatgcagttgataagaggaatttggtataattatggtgggtgattattttttatactgtatgtgccaaagctttactactgtggaaagacaactgttttaataaaagatttacattccacaacttgaagttcatctatttgatataagacaccttcgggggaaataattcctgtgaatattctttttcaattcagcaaacatttgaaaatctatgatgtgcaagtctaattgttgatttcagtacaagattttctaaatcagttgctacaaaaactgattggtttttgtcacttcatctcttcactaatggagatagctttacactttctgctttaatagatttaagtggaccccaatatttattaaaattgctagtttaccgttcagaagtataatagaaataatctttagttgctcttttctaaccattgtaattcttcccttcttccctccacctttccttcattgaataaacctctgttcaaagagattgcctgcaagggaaataaaaatgactaagatattaaaaaaaaaaaaaaaaaa

SEQ ID NO: 16 - DNA, 2397 bp, Homo sapiens
gcacacactcatcgaaaaaaatttggattattagaagagagaggtctgcggcttccacaccgtacagcgtggtttttcttctcggtataaaagcaaagttgtttttgatacgtgacagtttcccacaagccaggctgatccttttctgtcagtccacttcaccaagcctgcccttggacaaggacccgatgcccaaccccaggcctggcaagccctcggccccttccttggcccttggcccatccccaggagcctcgcccagctggagggctgcacccaaagcctcagacctgctgggggcccggggcccagggggaaccttccagggccgagatcttcgaggcggggcccatgcctcctcttcttccttgaaccccatgccaccatcgcagctgcagctgcccacactgcccctagtcatggtggcaccctccggggcacggctgggccccttgccccacttacaggcactcctccaggacaggccacatttcatgcaccagctctcaacggtggatgcccacgcccggacccctgtgctgcaggtgcaccccctggagagcccagccatgatcagcctcacaccacccaccaccgccactggggtcttctccctcaaggcccggcctggcctcccacctgggatcaacgtggccagcctggaatgggtgtccagggagccggcactgctctgcaccttcccaaatcccagtgcacccaggaaggacagcaccctttcggctgtgccccagagctcctacccactgctggcaaatggtgtctgcaagtggcccggatgtgagaaggtcttcgaagagccagaggacttcctcaagcactgccaggcggaccatcttctggatgagaagggcagggcacaatgtctcctccagagagagatggtacagtctctggagcagcagctggtgctggagaaggagaagctgagtgccatgcaggcccacctggctgggaaaatggcactgaccaaggcttcatctgtggcatcatccgacaagggctcctgctgcatcgtagctgctggcagccaaggccctgtcgtcccagcctggtctggcccccgggaggcccctgacagcctgtttgctgtccggaggcacctgtggggtagccatggaaacagcacattcccagagttcctccacaacatggactacttcaagttccacaacatgcgaccccctttcacctacgccacgctcatccgctgggccatcctggaggctccagagaagcagcggacactcaatgagatctaccactggttcacacgcatgtttgccttcttcagaaaccatcctgccacctggaagaacgccatccgccacaacctgagtctgcacaagtgctttgtgcgggtggagagcgagaagggggctgtgtggaccgtggatgagctggagttccgcaagaaacggagccagaggcccagcaggtgttccaaccctacacctggcccctgacctcaagatcaaggaaaggaggatggacgaacaggggccaaactggtgggaggcagaggtggtgggggcagggatgataggccctggatgtgcccacagggaccaagaagtgaggtttccactgtcttgcctgccagggcccctgttcccccgctggcagccaccccctcccccatcatatcctttgccccaaggctgctcagaggggccccggtcctggccccagcccccacctccgccccagacacaccccccagtcgagccctgcagccaaacagagccttcacaaccagccacacagagcctgcctcagctgctcgcacagattacttcagggctggaaaagtcacacagacacacaaaatgtcacaatcctgtccctcactcaacacaaaccccaaaacacagagagcctgcctcagtacactcaaacaacctcaaagctgcatcatcacacaatcacacacaagcacagccctgacaacccacacaccccaaggcacgcacccacagccagcctcagggcccacaggggcactgtcaacacaggggtgtgcccagaggcctacacagaagcagcgtcagtaccctcaggatctgaggtcccaacacgtgctcgctcacacacacggcctgttagaattcacctgtgtatctcacgcatatgcacacgcacagccccccagtgggtctcttgagtcccgtgcagacacacacagccacacacactgccttgccaaaaataccccgtgtctcccctgccactcacctcactcccattccctgagccctgatccatgcctcagcttagactgcagaggaactactcatttatttgggatccaaggcccccaacccacagtaccgtccccaataaactgcagccgagctccccacaaaaaaaaaaaaaaaa

SEQ ID NO: 17 - DNA, 1936 bp, Homo sapiens
acagctcttgccaggcaaggcagccgaccacaggtgagtcttggcatctaccgttttcaagtgaccaggatgaagacactccagtttttcttccttttctgttgctggaaagcaatctgctgcaatagctgtgagctgaccaacatcaccattgcaatagagaaagaagaatgtcgtttctgcataagcatcaacaccacttggtgtgctggctactgctacaccagggatctggtgtataaggacccagccaggcccaaaatccagaaaacatgtaccttcaaggaactggtatacgaaacagtgagagtgcccggctgtgctcaccatgcagattccttgtatacatacccagtggccacccagtgtcactgtggcaagtgtgacagcgacagcactgattgtactgtgcgaggcctggggcccagctactgctcctttggtgaaatgaaagaataaagatcagtggacatttcaggccacatacccttgtcctgaaggaccaagatattcaaaaagtctgtgtgtgtgcaatgtgcccaggggacaaaccactggatcaggggattcagactctactgatccctggtctactggcagagggaactctgggaattgagagtgctgggggccaggactccatcatgattcagctctatattcctaggtctgatttcataaggtttattcagtcttaactcacagacttgtgcctggtttcttctttaaaaatcttagaaatcttctcaggcaatgcctctctcttagggggaaacataagcctagaaggaggaagcagtaatgggagtgagtgaaagaactaactgcagcagtcttctggtagactcttgggccctctagagcaaggtcagcatcttcagcattgtagcgtcaatgcctagcactctgcctggaacttagaaacacaacaatgacttctttagatcagaaaggtcaagggtagaaaatactggaagacgatgtttgaggtaagctgatgaggctgcccgcagccacaccagtcccatgaaagttagtggcatcagttccacctcgccttttctccagcacatggagtattgagacatgatgtatctttctgaattgtttggtacagatggggagtaacagagctcaagatttccaagctattactaccaagcctgttagttaagggcaaaggcaagaaattgtaatttggggctgtggaaattagcctgcctctattcattacttaaacaaattgatcacatgctactaggctcctgcaaaactcctttttgagataaagggaaaaaaccaaactatctcaccctaccctccctaggatccacttctttggaatgacaaaggatttgaaagtaggtttgaaagcagtttcagcaatttaataaatataattaatttgtctacaaatatatttgtataaataaatagctcctttagaaagaattagccatgggggacgaggggaaactgctgttttctaggatcctgtctacatcaatcttctattttatccatccatgttctcccaaatctgtgctttctttcaacaggttatatattaaaactatttcatgagttgatttcttttaaacgtgttaactgtcttagttatgcactcagtttcacactcatattgtttaactaatttatttaaatcttatttttttaataaagatgctagccaccagagtcacaggcttggattgttttatgtacaaacagatgacttagatattctgtattttataatattagtggaatgaaatcttaaaatataattcccagtgtttctataaatattacctttccttatctttggagatattaaaaataattttgttggatttctgaagtgttttgtcacttaaatttcctgtcattttttgaagacattttctgatgtaatttgggagaaaaaaagcataga

SEQ ID NO: 18 - DNA, 1834 bp, Homo sapiens
ttgggaagggtttccagaaggtgggaaatgtcacctgattcacactgaacttttgaaagctccccacccccaaggagccgcgcacaccctcgctcgcggccgccctcccacagccccacacactgggagaccgcccaccgcaaaccgcggagacccccgtctagatttaaagcgcggctgcgcccggcttctgacgtccattgaatcgcgcgggcggccggcggcgagcgcggggctgcgccgggatcgctgcgccctccgccgctggcctctgcgacgcgcgccgctcgcccgagccacccgccgccgcgccggctccccgcgccgctgcgctcctcgccccgcgcctgcccccaggatggtccgcgcgaggcaccagccgggtgggctttgcctcctgctgctgctgctctgccagttcatggaggaccgcagtgcccaggctgggaactgctggctccgtcaagcgaagaacggccgctgccaggtcctgtacaagaccgaactgagcaaggaggagtgctgcagcaccggccggctgagcacctcgtggaccgaggaggacgtgaatgacaacacactcttcaagtggatgattttcaacgggggcgcccccaactgcatcccctgtaaagaaacgtgtgagaacgtggactgtggacctgggaaaaaatgccgaatgaacaagaagaacaaaccccgctgcgtctgcgccccggattgttccaacatcacctggaagggtccagtctgcgggctggatgggaaaacctaccgcaatgaatgtgcactcctaaaggcaagatgtaaagagcagccagaactggaagtccagtaccaaggcagatgtaaaaagacttgtcgggatgttttctgtccaggcagctccacatgtgtggtggaccagaccaataatgcctactgtgtgacctgtaatcggatttgcccagagcctgcttcctctgagcaatatctctgtgggaatgatggagtcacctactccagtgcctgccacctgagaaaggctacctgcctgctgggcagatctattggattagcctatgagggaaagtgtatcaaagcaaagtcctgtgaagatatccagtgcactggtgggaaaaaatgtttatgggatttcaaggttgggagaggccggtgttccctctgtgatgagctgtgccctgacagtaagtcggatgagcctgtctgtgccagtgacaatgccacttatgccagcgagtgtgccatgaaggaagctgcctgctcctcaggtgtgctactggaagtaaagcactccggatcttgcaactccatttcggaagacaccgaggaagaggaggaagatgaagaccaggactacagctttcctatatcttctattctagagtggtaaactctctataagtgttcagtgttgacatagcctttgtgcaaaaaaaaaaaaaaaaaaaaagaaaaagaaaaaaagaaaaatatattgtccatactgtaaataagtgtatgcttatttatttggggggaaaactatacattaaaggacctttgtcctaaagctctctcccaggccaccttgttactcattggacacggagaggcattcattgtgaggtctactggatgaggcccatagttgagacttgtagacatttatttatactgtgtcatgttttataatttatacataaaatgtctggttgactgtataccttgtttttgaagaaatttattcgtgaaaggaagagcagttgttatttattgtgaggtctcttgcttgtaaagtaaaagctttttttccttgtaaaccatttaagtccattccttactattcactcac

SEQ ID NO: 19 - DNA, 2525 bp, Homo sapiens
gggaagtcggtgccgctgccgtctctgcgttcgccatgcgtcccggggcgccagggccactctggcctctgccctggggggccctggcttgggccgtgggcttcgtgagctccatgggctcggggaaccccgcgcccggtggtgtttgctggctccagcagggccaggaggccacctgcagcctggtgctccagactgatgtcacccgggccgagtgctgtgcctccggcaacattgacaccgcctggtccaacctcacccacccggggaacaagatcaacctcctcggcttcttgggccttgtccactgccttccctgcaaagattcgtgcgacggcgtggagtgcggcccgggcaaggcgtgccgcatgctggggggccgcccgcgctgcgagtgcgcgcccgactgctcggggctcccggcgcggctgcaggtctgcggctcagacggcgccacctaccgcgacgagtgcgagctgcgcgccgcgcgctgccgcggccacccggacctgagcgtcatgtaccggggccgctgccgcaagtcctgtgagcacgtggtgtgcccgcggccacagtcgtgcgtcgtggaccagacgggcagcgcccactgcgtggtgtgtcgagcggcgccctgccctgtgccctccagccccggccaggagctttgcggcaacaacaacgtcacctacatctcctcgtgccacatgcgccaggccacctgcttcctgggccgctccatcggcgtgcgccacgcgggcagctgcgcaggcacccctgaggagccgccaggtggtgagtctgcagaagaggaagagaacttcgtgtgagcctgcaggacaggcctgggcctggtgcccgaggccccccatcatcccctgttatttattgccacagcagagtctaatttatatgccacggacactccttagagcccggattcggaccacttggggatcccagaacctccctgacgatatcctggaaggactgaggaagggaggcctgggggccggctggtgggtgggatagacctgcgttccggacactgagcgcctgatttagggcccttctctaggatgccccagcccctaccctaagacctattgccggggaggattccacacttccgctcctttggggataaacctattaattattgctactatcaagagggctgggcattctctgctggtaattcctgaagaggcatgactgcttttctcagccccaagcctctagtctgggtgtgtacggagggtctagcctgggtgtgtacggagggtctagcctgggtgagtacggagggtctagcctgggtgagtacggagggtctagcctgggtgagtacggagggtctagcctgggtgtgtatggaggatctagcctgggtgagtatggagggtctagcctgggtgagtatggagggtctagcctgggtgtgtatggagggtctagcctgggtgagtatggagggtctagcctgggtgtgtatggagggtctagcctgggtgagtatggagggtctagcctgggtgtgtacggagggtctagtctgagtgcgtgtggggacctcagaacactgtgaccttagcccagcaagccaggcccttcatgaaggccaagaaggctgccaccattccctgccagcccaagaactccagcttccccactgcctctgtgtgcccctttgcgtcctgtgaaggccattgagaaatgcccagtgtgccccctgggaaagggcacggcctgtgctcctgacacgggctgtgcttggccacagaaccacccagcgtctcccctgctgctgtccacgtcagttcatgaggcaacgtcgcgtggtctcagacgtggagcagccagcggcagctcagagcagggcactgtgtccggcggagccaagtccactctgggggagctctggcggggaccacgggccactgctcacccactggccccgaggggggtgtagacgccaagactcacgcatgtgtgacatccggagtcctggagccgggtgtcccagtggcaccactaggtgcctgctgcctccacagtggggttcacacccagggctccttggtcccccacaacctgccccggccaggcctgcagacccagactccagccagacctgcctcacccaccaatgcagccggggctggcgacaccagccaggtgctggtcttgggccagttctcccacgacggctcaccctcccctccatctgcgttgatgctcagaatcgcctacctgtgcctgcgtgtaaaccacagcctcagaccagctatggggagaggacaacacggaggatatccagcttccccggtctggggtgaggaatgtggggagcttgggcatcctcctccagcctcctccagcccccaggcagtgccttacctgtggtgcccagaaaagtgcccctaggttggtgggtctacaggagcctcagccaggcagcccaccccaccctggggccctgcctcaccaaggaaataaagactcaagccatttaaaaaaaaaaaaaa

SEQ ID NO: 20 - DNA, 1398 bp, Homo sapiens
ggagagcggggccctttgtcctccagtggctggtaggcagtggctgggaggcagcggcccaattagtgtcgtgcggcccgtggcgaggcgaggtccggggagcgagcgagcaagcaaggcgggaggggtggccggagctgcggcggctggcacaggaggaggagcccgggcgggcgaggggcggccggagagcgccagggcctgagctgccggagcggcgcctgtgagtgagtgcagaaagcaggcgcccgcgcgctagccgtggcaggagcagcccgcacgccgcgctctctccctgggcgacctgcagtttgcaatatgactttggaggaattctcggctggagagcagaagaccgaaaggatggataaggtgggggatgccctggaggaagtgctcagcaaagccctgagtcagcgcacgatcactgtcggggtgtacgaagcggccaagctgctcaacgtcgaccccgataacgtggtgttgtgcctgctggcggcggacgaggacgacgacagagatgtggctctgcagatccacttcaccctgatccaggcgttttgctgcgagaacgacatcaacatcctgcgcgtcagcaacccgggccggctggcggagctcctgctcttggagaccgacgctggccccgcggcgagcgagggcgccgagcagcccccggacctgcactgcgtgctggtgacgaatccacattcatctcaatggaaggatcctgccttaagtcaacttatttgtttttgccgggaaagtcgctacatggatcaatgggttccagtgattaatctccctgaacggtgatggcatctgaatgaaaataactgaaccaaattgcactgaagtttttgaaatacctttgtagttactcaagcagttactccctacactgatgcaaggattacagaaactgatgccaaggggctgagtgagttcaactacatgttctgggggcccggagatagatgactttgcagatggaaagaggtgaaaatgaagaaggaagctgtgttgaaacagaaaaataagtcaaaaggaacaaaaattacaaagaaccatgcaggaaggaaaactatgtattaatttagaatggttgagttacattaaaataaaccaaatatgttaaagtttaagtgtgcagccatagtttgggtatttttggtttatatgccctcaagtaaaagaaaagccgaaagggttaatcatatttgaaaaccatattttattgtattttgatgagatattaaattctcaaagttttattataaattctactaagttattttatgacatgaaaagttatttatgctataaattttttgaaacacaatacctacaataaactggtatgaataattgcatcatttcaaaaaaaaaaaaaaaaaa

SEQ ID NO: 21 - DNA, 1393 bp, Homo sapiens
tcagatcgccgaagcgtcggactaccgttggtttccgcaacttcctggattatcctcgccaaggactttgcaatatatttttccgccttttctggaaggatttcgctgcttcccgaaggtcttggacgagcgctctagctctgtgggaaggttttgggctctctggctcggattttgcaatttctccctggggactgccgtggagccgcatccactgtggattataattgcaacatgacgctggaagagctcgtggcgtgcgacaacgcggcgcagaagatgcagacggtgaccgccgcggtggaggagcttttggtggccgctcagcgccaggatcgcctcacagtgggggtgtacgagtcggccaagttgatgaatgtggacccagacagcgtggtcctctgcctcttggccattgacgaggaggaggaggatgacatcgccctgcaaatccacttcacgctcatccagtccttctgctgtgacaacgacatcaacatcgtgcgggtgtcgggcatgcagcgcctggcgcagctcctgggagagccggccgagacccagggcaccaccgaggcccgagacctgcattgtctcctggtcacgaaccctcacacggacgcctggaagagccacggcttggtggaggtggccagctactgcgaagaaagccggggcaacaaccagtgggtcccctacatctctcttcaggaacgctgaggcccttcccagcagcagaatctgttgagttgctgccacaaacaaaaaatacaataaatatttgaaccccctcccccccagcacaacccccccaaaacaacccaacccacgaggaccatcgggggcagagtcgttggagactgaagaggaagaggaggaggagaaggggagtgagcggccgcccccagggcggagatccaggagctggcggccgccgatccgatggagaaggggggacccaggccagcaggagacaggacccccgaagctgaggccttgggatggagcagaagccggagtggcggggcacgctgccgccttccccatcacggagggtccagactgtccactcgggggtggagtgagactgactgcaagccccaccctccttgagactggagctggcgtctgcatacgagagacttggttgaacttggttggtccttgtctgcaccctcgacaagaccacactttgggacttgggagctggggctgaagttgctctgtacccatgaactcccagtttgcgaattatagagacaatctattttgttacttgcacttgttattcgaaccactgagagcgagatgggaagcatagatatctatatttttatttctactatgagggccttgtaataaatttctaaagcctctgaaaaaaaaaaaaaaaaaa

SEQ ID NO: 22 - DNA, 5843 bp, Homo sapiens
ttggttgctggtccacttacaaacacttttcatatttgtatgtctttccaatggttatcctgttttgttcatttcaggcatatggccctgatcagattaactgacatgatgtatatgcaaagccttttgagttcttcagaaaaataaattatcttattcaagactgattgcttataaggaacttattatagctaatatagtaggcacaattttttttttgtaattctcctagatgagtcagaacttagttttgacgtaggtaaaaattttatggtcacaaatctcaggtgtgagaaaatctctttccttgatactctatataaatagaggatataaatatttcaagtctggaagtagtgagagaagctggtaattctggacatatagtgacagtcaaaaaggagctcaggtacaggactggtctaagctgctcaagattcaggagacagccagtacacagagaagctgaggagatacataagatatatctaaaacatttatctaaccttctgtggtaacaagctccttaaaggggctggatgatgttgtgttcactttttatcaccagcaaaggctaagataatgtatatagtaaatatttagtaactatttattaaataaataaatatttaagacagaataaacaagtataataaatgaaccaataagaatgcaccatctaagtcaaaatagccacttttatccttaacattgtacctgctttggctgctgcagaagcaaacttgttggcattagacaaatcaagctggtgatttaataaattccaatgtaagtcttaccagtattgatgaataactatccagcactcaccatgaaagttaaagaaacaacacagaaaaagttcctaagtggtcccaatttgaaatgatcagataacctataaaagaacatattcatattatactaacataaacacatataaatgcacttacagcagttacacagtattctcttcaataactagtttccttatgcattaatgtgtaataacagcaactacaatatttagataattataaaaaccaaggcaataatttaaaaactgattaaccgttttactctaacttaagcatggattggatcagtaagattgattaataaatttgaatgcagtcagttggattgattctaatttaaagttttaatttgttgtagaataattttaagtgaatatatttgtccagtgttcgagtgctcaacagtgtgtttgaaaaggaaaacaaagaaatgtttttgagaaatgtgttaattccttaagacaatggattttaattggatctagttgttttcatttttcttcattatcattatacatctgtatgttggacagaacactaacactaaatagtttttagaaaaattttttaaagttatttaaatcataatatcatgactgacttttaaattcaaaattaggctgtgactatccttcttcacttaggaagagtgttgtgaaagccagaccatctgctgaggtgctacagttacatgtggccctcagaatgcatttggcctgctctgttttagcactctgttggattaccaatacacaaaacaagttaaccttgatctttcacattaagtatctcagggacaaaatttgacatacgtctaaacctgtgacgtttccatctaaagaaggcagaaataaaacaggactttagattcggttacaataaaatatcagatgcaccagagacacaaggcttgaagctctgtcctgggaaaatatggcaaacagtgcctctcctgaacagaatcaaaatcactgttcagccatcaacaacagcatcccactgatgcagggcaacctccccactctgaccttgtctggaaagatccgagtgacggttactttcttcctttttctgctctctgcgacctttaatgcttctttcttgttgaaacttcagaagtggacacagaagaaagagaaagggaaaaagctctcaagaatgaagctgctcttaaaacatctgaccttagccaacctgttggagactctgattgtcatgccactggatgggatgtggaacattacagtccaatggtatgctggagagttactctgcaaagttctcagttatctaaagcttttctccatgtatgccccagccttcatgatggtggtgatcagcctggaccgctccctggctatcacgaggcccctagctttgaaaagcaacagcaaagtcggacagtccatggttggcctggcctggatcctcagtagtgtctttgcaggaccacagttatacatcttcaggatgattcatctagcagacagctctggacagacaaaagttttctctcaatgtgtaacacactgcagtttttcacaatggtggcatcaagcattttataactttttcaccttcagctgcctcttcatcatccctcttttcatcatgctgatctgcaatgcaaaaatcatcttcaccctgacacgggtccttcatcaggacccccacgaactacaactgaatcagtccaagaacaatataccaagagcacggctgaagactctaaaaatgacggttgcatttgccacttcatttactgtctgctggactccctactatgtcctaggaatttggtattggtttgatcctgaaatgttaaacaggttgtcagacccagtaaatcacttcttctttctctttgcctttttaaacccatgctttgatccacttatctatggatatttttctctgtgattgatagactacacaagaagtcatatgaagaagggtaaggtaatgaatctctccatctgggaatgattaacacaaatgttggagcatgtttacatacaaacaaagtaggatttacacttaagttatcattcttttagaaactcagtcttcagagcctcaattattaaggaaaagtcttcaggaaaaatactaaaatattttctcttcctcataagcttctaaattaatctctgccttttctgacctcatataacacattatgtaggtttcttatcactttctctttgcataataatgtactaatatttaaaataccttcagcctaaggcacaaggatgccaaaaaaacaaaggtgagaaaccacaacacaggtctaaactcagcatgctttggtgagtttttctccaaaaggggcatattagcaattagagttgtatgctatataatacatagagcacagagccctttgcccataatatcaactttccctcctatagttaaaaagaaaaaaaatgaatctatttttctctttggcttcaaaagcattctgacatttggaggagtcagtaaccaatcccaccaaccactccagcaacctgacaagactatgagtagttctccttcatcctatttatgtggtacaggttgtgaagtatctctatataaagggaaattttagaggggttaggatttggacaggggtttagaacattcctctaagctatctagtctgtggagtttgtggcaattaattgccataaaataacaatgtttccaaatgcaactaagaaaatactcatagtgagtacgctctatgcatagtatgacttctattttaatgtgaagaattttttgtctctctcctgatcttactaaatccatatttcataaataactgagaataattaaaacaaaattaagcaaatgcacaagcaaaaagatgcttgatacacaaaaggaactctggagagaaaactacagcttcagtctgtacagatcaaagaagacagaacatgtcaggggaaggagggaaagatcttgatgcagggtttcttaacctgcagtctatgcacaacactatatttccatgtaatgtttttatttcagccctatttgtattattttgtgcatttaaaaaacacaatcttaaggggatagactagactgccacagcagcccatggcacaactaacacctactgatattcacattaaatagtatggtttccaaaatatgtctgcacaacaagacctctttatgtaattcaggcttgtgtctacctcttccatgaaaaatggaaagggatgaaaataatgggagtataatacccatttaatgtgaaaaacataagagtcttaaaagaaattaagccatttaacattttttaaataggtaagataccattatatttatatgagctatgtactgccacaaaaaaagatgaaatgtaatttctaaatactccaggtgtgtggtattatggaaagcaaattgccaactaatggcacgtcctttctttctttgattttctcctctcatacttcagttttatagtgttgtgttgttgtttttttcatatcctaccttactttccaattctgtctcaattgaactccctctgtctactcactctttcattcatagcttcttttccattaaactcatacctttaattaaccaattcatggcccagttctacagttgaattggacaaggctaaaattctgtagtgtgctaaaatgctcaagttggcacataaacccattccaagattttatagttcttgtagataacacagggatgtagataagttgaaacaaaaccagtgtcctctaagtctctatcatatacttattcctaaactgataattcttacttctggatttaaaatcaaaaataacacacttgtacagatacaatctaagggctttatcacacacgtgttaacgaatgtatctcagcttggttcttcttgtgtgctcattatggatctctctgtcttaggaattgcctcaggcattttttttttttacacattaactaaagggctattcgaaatcttgactcaggggttcttaacctacatttcatgcaaaaaatatatatatttcaatgtattttttattttagtcctatttgtattattttatgcatttaaaaacacagtcctgagagggatggaccagactgccacagcagctcatagcacaaaaaaaggttaagaagtcctagttgactttgtatatatataaagaaatctattacaataaaaatataacataatctattcatctatttatatgcaaacataaaaatgtaaatattgaaacaagattgcttcaatatgcttattgttttcaaaccaacaaactctcttaaggttcaatatgtaataaaaaacataacacaaataattattctatatgaatattatggttcataaattataatgtataatctatacattataatgtaatatataaactaaaatttatggcacaaaagataaatatggctttgaaattaaagatattccactcaacagacaatatttcatatttgatattacaatcatttattttatgtcctattataataaaaggtgaggactccttgtaaaaaaggaaatgttccacagagtcaatctaatatatcagatattggagattctatcttggtttctcttcctttacttagcctataaaactagttaaaaatggaatttcttttagcaattcagtttagtacaggagtgacattaactaatgacaataaattaaacaaagcctacattagttcaatttaagcctattcaacagaaatatagaaatatagtagctaaaaaaatactctggggaaggtaccacaaacattatctaccagggaacatagcataaattagtctgaaatttcctgagagtgactttgtcttagaacttaggtggtagtcatgaagagataatgtttttaggcagttaaaatacttctagaactccatctattttacctgtggtccactttcctacattgaaccaatgccttgggcttctctaattactatacattgtgctcatatgaataaaagaaattttaaaagaaaaaaaa

SEQ ID NO: 23 - DNA, 1217 bp, Homo sapiens
agggggcggggaggggcgcagggctgcgcgctcgccggcgctctctttcggtttggtcggcggctggaggagagtggacccccccactttaaggctctgtcctcggcgcgttcccgccgccccccggtcccgacgcggggctcggggatgcccgccagcatgttcagcatcgacaacatcctagccgcccggccgcgctgcaaggactcggtgttgccggtggcgcacagcgcggcggctcccgtcgtcttcccggccctgcacggggactcgctctacggcgccagcggcggcgcctcctcggactatggcgccttctacccgcgccccgtggcccccggcggcgcgggcctcccggccgcggtcagcggctcccgcctcggctacaacaactacttctacgggcagctgcacgtgcaggcggcgcccgtgggcccggcctgctgcggggccgtgccgccgctgggcgcccagcagtgctcctgcgtcccgacgcccccaggctacgagggccccggttcggtgctggtgtccccggtaccgcaccagatgctgccctacatgaacgtgggcacgctgtcgcgcaccgagctgcagcttctcaaccagctgcactgtcggcggaagcggcggcaccgcaccatcttcactgacgagcagctcgaagctctcgagaacctcttccaggagaccaagtacccggacgtgggcacgcgcgagcagctggcccggaaagtgcacctccgcgaggagaaagtggaggtctggtttaagaaccgccgcgccaaatggaggcggcagaagcggtcctcatcagaggagtcggagaacgcggagaagtggaacaagacgtcgtcgtcgaaggcgtcaccggagaagagggaagaggaaggtaaaagcgatttggactcggacagctgacggccgcgggacacttgcccgtattacttacctaactcgaaggacttgcacagacagacgatgctactttcttgcacacgcgctgccttgcgggagggggtcgagaaagaggaacgaggagctgtaaatagtgtacagagccgggagggtcggcgtctggggtcagggcgcgcacagcccagcagcccgaggccgcccgcgactagcccccaccgtagtatttatagttaaattaagggtgacagtacaataaagtgatggcgatgtaaaaaaaaaaaaaaaaaaaaaaaaaaaaa

SEQ ID NO: 24 - DNA, 430 bp, Homo sapiens
gactgtcactcggtcccagacaccagagcaagctcaagacccagcagtgggacagccagacagacggcacgatggcactgagctcccagatctgggccgcttgcctcctgctcctcctcctcctcgccagcctgaccagtggctctgttttcccacaacagacgggacaacttgcagagctgcaaccccaggacagagctggagccagggccagctggatgcccatgttccagaggcgaaggaggcgagacacccacttccccatctgcattttctgctgcggctgctgtcatcgatcaaagtgtgggatgtgctgcaagacgtagaacctacctgccctgcccccgtcccctcccttccttatttattcctgctgccccagaacataggtcttggaataaaatggctggttcttttgttttccaaaaaa

SEQ ID NO: 25 - DNA, 2319 bp, Homo sapiens
ttccccactcccccgccctccccagggccctgggaaggggctcagcgtgggaaaggatggttgagttttaaccagaggcaaagcgtgagcgggatcagtgtgtgcggaacgcaagcagccgagagcggagaggcgccgctgtagttaactcctccctgcccgccgcgccgaccctccccaggaacccccagggagccagcatgaagcgagctcaccccgagtacagctcctcggacagcgagctggacgagaccatcgaggtggagaaggagagtgcggacgagaatggaaacttgagttcggctctaggttccatgtccccaactacatcttcccagattttggccagaaaaagacggagaggaataattgagaagcgccgacgagaccggatcaataacagtttgtctgagctgagaaggctggtacccagtgcttttgagaagcagggatctgctaagctagaaaaagccgagatcctgcagatgaccgtggatcacctgaaaatgctgcatacggcaggagggaaaggttactttgacgcgcacgcccttgctatggactatcggagtttgggatttcgggaatgcctggcagaagttgcgcgttatctgagcatcattgaaggactagatgcctctgacccgcttcgagttcgactggtttcgcatctcaacaactacgcttcccagcgggaagccgcgagcggcgcccacgcgggcctcggacacattccctgggggaccgtcttcggacatcacccgcacatcgcgcacccgctgttgctgccccagaacggccacgggaacgcgggcaccacggcctcacccacggaaccgcaccaccagggcaggctgggctcggcacatccggaggcgcctgctttgcgagcgccccctagcggcagcctcggaccggtgctccctgtggtcacctccgcctccaaactgtcgccgcctctgctctcctcagtggcctccctgtcggccttccccttctctttcggctccttccacttactgtctcccaatgcactgagcccttcagcacccacgcaggctgcaaaccttggcaagccctatagaccttgggggacggagatcggagctttttaaagaactgatgtagaatgagggaggggaaagtttaaaatcccagctgggctggactgttgccaacatcaccttaaagtcgtcagtaaaagtaaaaaggaaaaaggtacactttcagataattttttttttaaagactaaaggtttgttggtttacttttatcttttttaatgtttttttcatcatgtcatgtattagcagtttttaaaaactagttgttaaattttgttcaagacattaaattgaaatagtgagtataagccaacactttgtgataggtttgtactgtgcctaatttactttgtaaaccagaatgattccgtttttgcctcaaaatttggggaatcttaacatttagtatttttggtctgtttttctccttgtatagttatggtctgtttttagaattaattttccaaaccactatgcttaatgttaacatgattctgtttgttaatattttgacagattaaggtgttgtataaataatattcttttggggggaggggaactatattgaattttatatttctgagcaaagcgttgacaaatcagatgatcagctttatccaagaaagaagactagtaaattgtctgcctcctatagcagaaaggtgaatgtacaaactgttggtggccctgaatccatctgaccagctgctggtatctgccaggactggcagttctgatttagttaggagagagccgctgataggttaggtctcatttggagtgttggtggaaaggaaactgaaggtaattgaatagaatacgcctgcatttaccagccccagcaacacaaagaatttttaatcacacggatctcaaattcacaaatgttaacatggataagtgatcatggtgtgcgagtggtcaattgagtagtacagtggaaactgttaaatgcataacctaattttcctgggactgccatattttcttttaactggaaatttttatgtgagttttccttttggtgcatggaactgtggttgccaaggtatttaaaagggctttcctgcctccttctctttgatttatttaatttgatttgggctataaaatatcatttttcaggtttattcttttagcaggtgtagttaaacgacctccactgaactgggtttgacctctgttgtactgatgtgttgtgactaaataaaaaagaaagaacaaagtaaaaaaaaaaaaaaaaaaaaaaaaaaa

SEQ ID NO: 26 - DNA, 4150 bp, Homo sapiens
cttgaatcttggggcaggaactcagaaaacttccagcccgggcagcgcgcgcttggtgcaagactcaggagctagcagcccgtccccctccgactctccggtgccgccgctgcctgctcccgccaccctaggaggcgcggtgccacccactactctgtcctctgcctgtgctccgtgcccgaccctatcccggcggagtctccccatcctcctttgctttccgactgcccaaggcactttcaatctcaatctcttctctctctctctctctctctctctctctctctctctctctctctctctctctctcgcagggtggggggaagaggaggaggaattctttccccgcctaacatttcaagggacacaattcactccaagtctcttccctttccaagccgcttccgaagtgctcccggtgcccgcaactcctgatcccaacccgcgagaggagcctctgcgacctcaaagcctctcttccttctccctcgcttccctcctcctcttgctacctccacctccaccgccacctccacctccggcacccacccaccgccgccgccgccaccggcagcgcctcctcctctcctcctcctcctcccctcttctctttttggcagccgctggacgtccggtgttgatggtggcagcggcggcagcctaagcaacagcagccctcgcagcccgccagctcgcgctcgccccgccggcgtccccagccctatcacctcatctcccgaaaggtgctgggcagctccggggcggtcgaggcgaagcggctgcagcggcggtagcggcggcgggaggcaggatgagcgcacgcggtgagggcgcggggcagccgtccacttcagcccagggacaacctgccgccccagcgcctcagaagagaggacgcggccgccccaggaagcagcagcaagaaccaaccggtgagccctctcctaagagacccaggggaagacccaaaggcagcaaaaacaagagtccctctaaagcagctcaaaagaaagcagaagccactggagaaaaacggccaagaggcagacctaggaaatggccacaacaagttgttcagaagaagcctgctcaggaggaaactgaagagacatcctcacaagagtctgccgaagaggactagggggcgccaacgttcgatttctacctcagcagcagttggatcttttgaagggagaagacactgcagtgaccacttattctgtattgccatggtctttccactttcatctggggtggggtggggtggggtgggggaggggggggtggggtggggagaaatcacataaccttaaaaaggactatattaatcaccttctttgtaatcccttcacagtcccaggtttagtgaaaaactgctgtaaacacaggggacacagcttaacaatgcaacttttaattactgttttcttttttcttaacctactaatagtttgttgatctgataagcaagagtgggcgggtgagaaaaaccgaattgggtttagtcaatcactgcactgcatgcaaacaagaaacgtgtcacacttgtgacgtcgggcattcatataggaagaacgcggtgtgtaacactgtgtacacctcaaataccaccccaacccactccctgtagtgaatcctctgtttagaacaccaaagataaggactagatactactttctctttttcgtataatcttgtagacacttacttgatgatttttaactttttatttctaaatgagacgaaatgctgatgtatcctttcattcagctaacaaactagaaaaggttatgttcatttttcaaaaagggaagtaagcaaacaaatattgccaactcttctatttatggatatcacacatatcagcaggagtaataaatttactcacagcacttgttttcaggacaacacttcattttcaggaaatctacttcctacagagccaaaatgccatttagcaataaataacacttgtcagcctcagagcatttaaggaaactagacaagtaaaattatcctctttgtaatttaatgaaaaggtacaacagaataatgcatgatgaactcacctaattatgaggtgggaggagcgaaatctaaatttcttttgctatagttatacatcaatttaaaaagcaaaaaaaaaaaaggggggggcaatctctctctgtgtctttctctctctctcttcctctccctctctcttttcattgtgtatcagtttccatgaaagacctgaataccacttacctcaaattaagcatatgtgttacttcaagtaatacgttttgacataagatggttgaccaaggtgcttttcttcggcttgagttcaccatctcttcattcaaactgcacttttagccagagatgcaatatatccccactactcaatactacctctgaatgttacaacgaatttacagtctagtacttattacatgctgctatacacaagcaatgcaagaaaaaaacttactgggtaggtgattctaatcatctgcagttctttttgtacacttaattacagttaaagaagcaatctccttactgtgtttcagcatgactatgtatttttctatgtttttttaattaaaaatttttaaaatacttgtttcagcttctctgctagatttctacattaacttgaaaattttttaaccaagtcgctcctaggttcttaaggataattttcctcaatcacactacacatcacacaagatttgactgtaatatttaaatattaccctccaagtctgtacctcaaatgaattctttaaggagatggactaattgacttgcaaagacctacctccagacttcaaaaggaatgaacttgttacttgcagcattcatttgttttttcaatgtttgaaatagttcaaactgcagctaaccctagtcaaaactatttttgtaaaagacatttgatagaaaggaacacgtttttacatacttttgcaaaataagtaaataataaataaaataaaagccaaccttcaaagaaacttgaagctttgtaggtgagatgcaacaagccctgcttttgcataatgcaatcaaaaatatgtgtttttaagattagttgaatataagaaaatgcttgacaaatattttcatgtattttacacaaatgtgatttttgtaatatgtctcaaccagatttattttaaacgcttcttatgtagagtttttatgcctttctctcctagtgagtgtgctgactttttaacatggtattatcaactgggccaggaggtagtttctcatgacggcttttgtcagtatggcttttagtactgaagccaaatgaaactcaaaaccatctctcttccagctgcttcagggaggtagtttcaaaggccacatacctctctgagactggcagatcgctcactgttgtgaatcaccaaaggagctatggagagaattaaaactcaacattactgttaactgtgcgttaaataagcaaataaacagtggctcataaaaataaaagtcgcattccatatctttggatgggccttttagaaacctcattggccagctcataaaatggaagcaattgctcatgttggccaaacatggtgcaccgagtgatttccatctctggtaaagttacacttttatttcctgtatgttgtacaatcaaaacacactactacctcttaagtcccagtatacctcatttttcatactgaaaaaaaaagcttgtggccaatggaacagtaagaacatcataaaatttttatatatatagtttatttttgtgggagataaattttataggactgttctttgctgttgttggtcgcagctacataagactggacatttaacttttctaccatttctgcaagttaggtatgtttgcaggagaaaagtatcaagacgtttaactgcagttgactttctccctgttcctttgagtgtcttctaactttattctttgttctttatgtagaattgctgtctatgattgtactttgaatcgcttgcttgttgaaaatatttctctagtgtattatcactgtctgttctgcacaataaacataacagcctctgtgatccccatgtgttttgattcctgctctttgttacagttccattaaatgagtaataaagtttggtcaaaacagaaaaaaaaaaa

SEQ ID NO: 27 - DNA, 1595 bp, Homo sapiens
gagtgagtgagagggcagaggaaatactcaatctgtgccactcactgccttgagcctgcttcctcactccaggactgccagaggaagcaatcaccaaaatgaagactgctttaattttgctcagcattttgggaatggcctgtgctttctcaatgaaaaatttgcatcgaagagtcaaaatagaggattctgaagaaaatggggtctttaagtacaggccacgatattatctttacaagcatgcctacttttatcctcatttaaaacgatttccagttcagggcagtagtgactcatccgaagaaaatggagatgacagttcagaagaggaggaggaagaagaggagacttcaaatgaaggagaaaacaatgaagaatcgaatgaagatgaagactctgaggctgagaataccacactttctgctacaacactgggctatggagaggacgccacgcctggcacagggtatacagggttagctgcaatccagcttcccaagaaggctggggatataacaaataaagctacaaaagagaaggaaagtgatgaagaagaagaggaggaagaggaaggaaatgaaaacgaagaaagcgaagcagaagtggatgaaaacgaacaaggcataaacggcaccagtaccaacagcacagaggcagaaaacggcaacggcagcagcggaggagacaatggagaagaaggggaagaagaaagtgtcactggagccaatgcagaagacaccacagagaccggaaggcagggcaagggcacctcgaagacaacaacctctccaaatggtgggtttgaacctacaaccccaccacaagtctatagaaccacttccccaccttttgggaaaaccaccaccgttgaatacgagggggagtacgaatacacgggcgccaatgaatacgacaatggatatgaaatctatgaaagtgagaacggggaacctcgtggggacaattaccgagcctatgaagatgagtacagctactttaaaggacaaggctacgatggctatgatggtcagaattactaccaccaccagtgaagctccagcctgggatgaattcatccattctggctttgcatccggctaccattttcgaagttcaactcaggaaggtgcaatataacaaatgtgcatattataatgaggaatggtactaccgttccagattttctgtaattgcttctgcaaagtaataggcttcttgtcccttttttttctggcatgttatggaatgatcattgtaaatcaggaccatttatcaagcagtacaccaactcataagatcaaatttcattgaatggtttgaggttgtagctctataaatagtagtttttaacatgcctgtagtattgctaactgcaaaaacatactctttgtacaagaagtgcttctaagaatttcattgacattaatgacactgtatacaataaatgtgtagtttcttaatcgcactacctatgcaacactgtgtattaggtttatcatcctcatgtatttttatgtgacctgtatgtatattctaatctacgagttttatcacaaataaaaatgcaatccttcaaatgtgttataattaaaaaa

SEQ ID NO: 28 - DNA, 1000 bp, Homo sapiens
actctcattccacgttcttaactgttccattttccgtatctgcttcgggcttccacctcatttttttcgctttgcccattctgtttcagccagtcgccaagaatcatgaaagtcgccagtggcagcaccgccaccgccgccgcgggccccagctgcgcgctgaaggccggcaagacagcgagcggtgcgggcgaggtggtgcgctgtctgtctgagcagagcgtggccatctcgcgctgcgccgggggcgccggggcgcgcctgcctgccctgctggacgagcagcaggtaaacgtgctgctctacgacatgaacggctgttactcacgcctcaaggagctggtgcccaccctgccccagaaccgcaaggtgagcaaggtggagattctccagcacgtcatcgactacatcagggaccttcagttggagctgaactcggaatccgaagttggaacccccgggggccgagggctgccggtccgggctccgctcagcaccctcaacggcgagatcagcgccctgacggccgaggcggcatgcgttcctgcggacgatcgcatcttgtgtcgctgaagcgcctcccccagggaccggcggaccccagccatccagggggcaagaggaattacgtgctctgtgggtctcccccaacgcgcctcgccggatctgagggagaacaagaccgatcggcggccactgcgcccttaactgcatccagcctggggctgaggctgaggcactggcgaggagagggcgctcctctctgcacacctactagtcaccagagactttagggggtgggattccactcgtgtgtttctattttttgaaaagcagacattttaaaaaatggtcacgtttggtgcttctcagatttctgaggaaattgctttgtattgtatattacaatgatcaccgactgaaaatattgttttacaatagttctgtggggctgtttttttgttattaaacaaataatttagatggtggtaaaaaaaaa

SEQ ID NO: 29 - DNA, 1402 bp, Homo sapiens
ggggacgaagggaagctccagcgtgtggccccggcgagtgcggataaaagccgccccgccgggctcgggcttcattctgagccgagcccggtgccaagcgcagctagctcagcaggcggcagcggcggcctgagcttcagggcagccagctccctcccggtctcgccttccctcgcggtcagcatgaaagccttcagtcccgtgaggtccgttaggaaaaacagcctgtcggaccacagcctgggcatctcccggagcaaaacccctgtggacgacccgatgagcctgctatacaacatgaacgactgctactccaagctcaaggagctggtgcccagcatcccccagaacaagaaggtgagcaagatggaaatcctgcagcacgtcatcgactacatcttggacctgcagatcgccctggactcgcatcccactattgtcagcctgcatcaccagagacccgggcagaaccaggcgtccaggacgccgctgaccaccctcaacacggatatcagcatcctgtccttgcaggcttctgaattcccttctgagttaatgtcaaatgacagcaaagcactgtgtggctgaataagcggtgttcatgatttcttttattctttgcacaacaacaacaacaacaaattcacggaatcttttaagtgctgaacttatttttcaaccatttcacaaggaggacaagttgaatggacctttttaaaaagaaaaaaaaaatggaaggaaaactaagaatgatcatcttcccagggtgttctcttacttggactgtgatattcgttatttatgaaaaagacttttaaatgccctttctgcagttggaaggttttctttatatactattcccaccatggggagcgaaaacgttaaaatcacaaggaattgcccaatctaagcagactttgccttttttcaaaggtggagcgtgaataccagaaggatccagtattcagtcacttaaatgaagtcttttggtcagaaattacctttttgacacaagcctactgaatgctgtgtatatatttatatataaatatatctatttgagtgaaaccttgtgaactctttaattagagttttcttgtatagtggcagagatgtctatttctgcattcaaaagtgtaatgatgtacttattcatgctaaactttttataaaagtttagttgtaaacttaacccttttatacaaaataaatcaagtgtgtttattgaatggtgattgcctgctttatttcagaggaccagtgctttgatttttattatgctatgttataactgaacccaaataaatacaagttcaaatttatgtagactgtataagattataataaaacatgtctgaagtcaaaaaaaaaaaaaaaaaaaaaaaaaaaaaaaaaaaaaaaa

SEQ ID NO: 30 - DNA, 1252 bp, Homo sapiens
gatctggggtgctgccaggaaaaagcaaattctggaagttaatggttttgagtgatttttaaatccttgctggcggagaggcccgcctctccccggtatcagcgcttcctcattctttgaatccgcggctccgcggtcttcggcgtcagaccagccggaggaagcctgtttgcaatttaagcgggctgtgaacgcccagggccggcgggggcagggccgaggcgggccattttgaataaagaggcgtgccttccaggcaggctctataagtgaccgccgcggcgagcgtgcgcgcgttgcaggtcactgtagcgggacttcttttggttttctttctctttggggcacctctggactcactccccagcatgaaggcgctgagcccggtgcgcggctgctacgaggcggtgtgctgcctgtcggaacgcagtctggccatcgcccggggccgagggaagggcccggcagctgaggagccgctgagcttgctggacgacatgaaccactgctactcccgcctgcgggaactggtacccggagtcccgagaggcactcagcttagccaggtggaaatcctacagcgcgtcatcgactacattctcgacctgcaggtagtcctggccgagccagcccctggaccccctgatggcccccaccttcccatccagacagccgagctcactccggaacttgtcatctccaacgacaaaaggagcttttgccactgactcggccgtgtcctgacacctccagaacgcaggtgctggcgcccgttctgcctgggaccccgggaacctctcctgccggaagccggacggcagggatgggccccaacttcgccctgcccacttgacttcaccaaatcccttcctggagactaaacctggtgctcaggagcgaaggactgtgaacttgtggcctgaagagccagagctagctctggccaccagctgggcgacgtcaccctgctcccaccccacccccaagttctaaggtctcttcagagcgtggaggtgtggaaggagtggctgctctccaaactatgccaaggcggcggcagagctggtcttctggtctccttggagaaaggttctgttgccctgatttatgaactctataatagagtatataggttttgtaccttttttacaggaaggtgactttctgtaacaatgcgatgtatattaaactttttataaaagttaacattttgcataataaacgatttttaaacacttgaaaaaaaaaaaaa

SEQ ID NO: 31 - DNA, 2381 bp, Homo sapiens
actgccgcggccctgctgctcagggcacatgcctcccctccccaggccgcggcccagctgaccctcggggctcccccggcagcggacagggaagggttaaaggcccccggctccctgccccctgccctggggaacccctggccctgtggggacatgaactgtgtttgccgcctggtcctggtcgtgctgagcctgtggccagatacagctgtcgcccctgggccaccacctggcccccctcgagtttccccagaccctcgggccgagctggacagcaccgtgctcctgacccgctctctcctggcggacacgcggcagctggctgcacagctgagggacaaattcccagctgacggggaccacaacctggattccctgcccaccctggccatgagtgcgggggcactgggagctctacagctcccaggtgtgctgacaaggctgcgagcggacctactgtcctacctgcggcacgtgcagtggctgcgccgggcaggtggctcttccctgaagaccctggagcccgagctgggcaccctgcaggcccgactggaccggctgctgcgccggctgcagctcctgatgtcccgcctggccctgccccagccacccccggacccgccggcgcccccgctggcgcccccctcctcagcctgggggggcatcagggccgcccacgccatcctgggggggctgcacctgacacttgactgggccgtgaggggactgctgctgctgaagactcggctgtgacccggggcccaaagccaccaccgtccttccaaagccagatcttatttatttatttatttcagtactgggggcgaaacagccaggtgatccccccgccattatctccccctagttagagacagtccttccgtgaggcctggggggcatctgtgccttatttatacttatttatttcaggagcaggggtgggaggcaggtggactcctgggtccccgaggaggaggggactggggtcccggattcttgggtctccaagaagtctgtccacagacttctgccctggctcttccccatctaggcctgggcaggaacatatattatttatttaagcaattacttttcatgttggggtggggacggaggggaaagggaagcctgggtttttgtacaaaaatgtgagaaacctttgtgagacagagaacagggaattaaatgtgtcatacatatccacttgagggcgatttgtctgagagctggggctggatgcttgggtaactggggcagggcaggtggaggggagacctccattcaggtggaggtcccgagtgggcggggcagcgactgggagatgggtcggtcacccagacagctctgtggaggcagggtctgagccttgcctggggccccgcactgcatagggccttttgtttgttttttgagatggagtctcgctctgttgcctaggctggagtgcagtgaggcaatctgaggtcactgcaacctccacctcccgggttcaagcaattctcctgcctcagcctcccgattagctgggatcacaggtgtgcaccaccatgcccagctaattatttatttcttttgtatttttagtagagacagggtttcaccatgttggccaggctggtttcgaactcctgacctcaggtgatcctcctgcctcggcctcccaaagtgctgggattacaggtgtgagccaccacacctgacccataggtcttcaataaatatttaatggaaggttccacaagtcaccctgtgatcaacagtacccgtatgggacaaagctgcaaggtcaagatggttcattatggctgtgttcaccatagcaaactggaaacaatctagatatccaacagtgagggttaagcaacatggtgcatctgtggatagaacgccacccagccgcccggagcagggactgtcattcagggaggctaaggagagaggcttgcttgggatatagaaagatatcctgacattggccaggcatggtggctcacgcctgtaatcctggcactttgggaggacgaagcgagtggatcactgaagtccaagagttcgagaccggcctgcgagacatggcaaaaccctgtctcaaaaaagaaagaatgatgtcctgacatgaaacagcaggctacaaaaccactgcatgctgtgatcccaattttgtgtttttctttctatatatggattaaaacaaaaatcctaaagggaaatacgccaaaatgttgacaatgactgtctccaggtcaaaggagagaggtgggattgtgggtgacttttaatgtgtatgattgtctgtattttacagaatttctgccatgactgtgtattttgcatgacacattttaaaaataataaacactatttttagaataacagaaaaa

SEQ ID NO: 32 - DNA, 1201 bp, Homo sapiens
aatattagagtctcaacccccaataaatataggactggagatgtctgaggctcattctgccctcgagcccaccgggaacgaaagagaagctctatctcccctccaggagcccagctatgaactccttctccacaagcgccttcggtccagttgccttctccctggggctgctcctggtgttgcctgctgccttccctgccccagtacccccaggagaagattccaaagatgtagccgccccacacagacagccactcacctcttcagaacgaattgacaaacaaattcggtacatcctcgacggcatctcagccctgagaaaggagacatgtaacaagagtaacatgtgtgaaagcagcaaagaggcactggcagaaaacaacctgaaccttccaaagatggctgaaaaagatggatgcttccaatctggattcaatgaggagacttgcctggtgaaaatcatcactggtcttttggagtttgaggtatacctagagtacctccagaacagatttgagagtagtgaggaacaagccagagctgtgcagatgagtacaaaagtcctgatccagttcctgcagaaaaaggcaaagaatctagatgcaataaccacccctgacccaaccacaaatgccagcctgctgacgaagctgcaggcacagaaccagtggctgcaggacatgacaactcatctcattctgcgcagctttaaggagttcctgcagtccagcctgagggctcttcggcaaatgtagcatgggcacctcagattgttgttgttaatgggcattccttcttctggtcagaaacctgtccactgggcacagaacttatgttgttctctatggagaactaaaagtatgagcgttaggacactattttaattatttttaatttattaatatttaaatatgtgaagctgagttaatttatgtaagtcatatttatatttttaagaagtaccacttgaaacattttatgtattagttttgaaataataatggaaagtggctatgcagtttgaatatcctttgtttcagagccagatcatttcttggaaagtgtaggcttacctcaaataaatggctaacttatacatatttttaaagaaatatttatattgtatttatataatgtataaatggtttttataccaataaatggcattttaaaaaattcagcaaaaaaaaaaaaaaaaaaa

SEQ ID NO: 33 - DNA, 5294 bp, Homo sapiens
ctagggcatggcatcccacgtgggtgtcagcacggccgcagaagaaccacttctctggcccacccatgcctgctaggccatgcttcttcagaagtggccacaactctcctgacgtctccagagccggtcattccacccagggggacttcagctgccactggacacttcaattgtacgctgcgaccagttgccaggaaggagagggctggcaagagagccgcggcagccgtggcagggtgtaggggacggtggacggccagggcccccccctctctctctttctctctctctctcttgcttggtttctgtaatgaggaagttctccgcagctcagtttcctttccctcactgagcgcctgaaacaggaagtcagtcagttaagctggtggcagcagccgaggccaccaagaggcaacgggcggcaggttgcagtggaggggcctccgctcccctcggtggtgtgtgggtcctgggggtgcctgccggcccggccgaggaggcccacgcccaccatggtcccctgctggaaccatggcaacatcacccgctccaaggcggaggagctgctttccaggacaggcaaggacgggagcttcctcgtgcgtgccagcgagtccatctcccgggcatacgcgctctgcgtgctgtatcggaattgcgtttacacttacagaattctgcccaatgaagatgataaattcactgttcaggcatccgaaggcgtctccatgaggttcttcaccaagctggaccagctcatcgagttttacaagaaggaaaacatggggctggtgacccatctgcaataccctgtgccgctggaggaagaggacacaggcgacgaccctgaggaggacacagtagaaagtgtcgtgtctccacccgagctgcccccaagaaacatcccgctgactgccagctcctgtgaggccaaggaggttcctttttcaaacgagaatccccgagcgaccgagaccagccggccgagcctctccgagacattgttccagcgactgcaaagcatggacaccagtgggcttccagaagagcatcttaaggccatccaagattatttaagcactcagctcgcccaggactctgaatttgtgaagacagggtccagcagtcttcctcacctgaagaaactgaccacactgctctgcaaggagctctatggagaagtcatccggaccctcccatccctggagtctctgcagaggttatttgaccagcagctctccccgggcctccgtccacgtcctcaggttcctggtgaggccaatcccatcaacatggtgtccaagctcagccaactgacaagcctgttgtcgtccattgaagacaaggtcaaggccttgctgcacgagggtcctgagtctccgcaccggccctcccttatccctccagtcacctttgaggtgaaggcagagtctctggggattcctcagaaaatgcagctcaaagtcgacgttgagtctgggaaactgatcattaagaagtccaaggatggttctgaggacaagttctacagccacaagaaaatcctgcagctcattaagtcacagaaatttctgaataagttggtgatcttggtggaaacagagaaggagaagatcctgcggaaggaatatgtttttgctgactccaaaaagagagaaggcttctgccagctcctgcagcagatgaagaacaagcactcagagcagccggagcccgacatgatcaccatcttcatcggcacctggaacatgggtaacgccccccctcccaagaagatcacgtcctggtttctctccaaggggcagggaaagacgcgggacgactctgcggactacatcccccatgacatttacgtgatcggcacccaagaggaccccctgagtgagaaggagtggctggagatcctcaaacactccctgcaagaaatcaccagtgtgacttttaaaacagtcgccatccacacgctctggaacatccgcatcgtggtgctggccaagcctgagcacgagaaccggatcagccacatctgtactgacaacgtgaagacaggcattgcaaacacactggggaacaagggagccgtgggggtgtcgttcatgttcaatggaacctccttagggttcgtcaacagccacttgacttcaggaagtgaaaagaaactcaggcgaaaccaaaactatatgaacattctccggttcctggccctgggcgacaagaagctgagtccctttaacatcactcaccgcttcacgcacctcttctggtttggggatcttaactaccgtgtggatctgcctacctgggaggcagaaaccatcatccagaaaatcaagcagcagcagtacgcagacctcctgtcccacgaccagctgctcacagagaggagggagcagaaggtcttcctacacttcgaggaggaagaaatcacgtttgccccaacctaccgttttgagagactgactcgggacaaatacgcctacaccaagcagaaagcgacagggatgaagtacaacttgccttcctggtgtgaccgagtcctctggaagtcttatcccctggtgcacgtggtgtgtcagtcttatggcagtaccagcgacatcatgacgagtgaccacagccctgtctttgccacatttgaggcaggagtcacttcccagtttgtctccaagaacggtcccgggactgttgacagccaaggacagattgagtttctcaggtgctatgccacattgaagaccaagtcccagaccaaattctacctggagttccactcgagctgcttggagagttttgtcaagagtcaggaaggagaaaatgaagaaggaagtgagggggagctggtggtgaagtttggtgagactcttccaaagctgaagcccattatctctgaccctgagtacctgctagaccagcacatcctcatcagcatcaagtcctctgacagcgacgaatcctatggcgagggctgcattgcccttcggttagaggccacagaaacgcagctgcccatctacacgcctctcacccaccatggggagttgacaggccacttccagggggagatcaagctgcagacctctcagggcaagacgagggagaagctctatgactttgtgaagacggagcgtgatgaatccagtgggccaaagaccctgaagagcctcaccagccacgaccccatgaagcagtgggaagtcactagcagggcccctccgtgcagtggctccagcatcactgaaatcatcaaccccaactacatgggagtggggccctttgggccaccaatgcccctgcacgtgaagcagaccttgtcccctgaccagcagcccacagcctggagctacgaccagccgcccaaggactccccgctggggccctgcaggggagaaagtcctccgacacctcccggccagccgcccatatcacccaagaagtttttaccctcaacagcaaaccggggtctccctcccaggacacaggagtcaaggcccagtgacctggggaagaacgcaggggacacgctgcctcaggaggacctgccgctgacgaagcccgagatgtttgagaaccccctgtatgggtccctgagttccttccctaagcctgctcccaggaaggaccaggaatcccccaaaatgccgcggaaggaacccccgccctgcccggaacccggcatcttgtcgcccagcatcgtgctcaccaaagcccaggaggctgatcgcggcgaggggcccggcaagcaggtgcccgcgccccggctgcgctccttcacgtgctcatcctctgccgagggcagggcggccggcggggacaagagccaagggaagcccaagaccccggtcagctcccaggccccggtgccggccaagaggcccatcaagccttccagatcggaaatcaaccagcagaccccgcccaccccgacgccgcggccgccgctgccagtcaagagcccggcggtgctgcacctccagcactccaagggccgcgactaccgcgacaacaccgagctcccgcatcacggcaagcaccggccggaggaggggccaccagggcctctaggcaggactgccatgcagtgaagccctcagtgagctgccactgagtcgggagcccagaggaacggcgtgaagccactggaccctctcccgggacctcctgctggctcctcctgcccagcttcctatgcaaggctttgtgttttcaggaaagggcctagcttctgtgtggcccacagagttcactgcctgtgagacttagcaccaagtgctgaggctggaagaaaaacgcacaccagacgggcaacaaacagtctgggtccccagctcgctcttggtacttgggaccccagtgcctcgttgagggcgccattctgaagaaaggaactgcagcgccgatttgagggtggagatatagataataataatattaataataataatggccacatggatcgaacactcatgatgtgccaagtgctgtgctaagtgctttacgaacattcgtcatatcaggatgacctcgagagctgaggctctagccacctaaaaccacgtgcccaaacccaccagtttaaaacggtgtgtgttcggaggggtgaaagcattaagaagcccagtgccctcctggagtgagacaagggctcggccttaaggagctgaagagtctgggtagcttgtttagggtacaagaagcctgttctgtccagcttcagtgacacaagctgctttagctaaagtcccgcgggttccggcatggctaggctgagagcagggatctacctggcttctcagttctttggttggaaggagcaggaaatcagctcctattctccagtggagagatctggcctcagcttgggctagagatgccaaggcctgtgccaggttccctgtgccctcctcgaggtgggcagccatcaccagccacagttaagccaagccccccaacatgtattccatcgtgctggtagaagagtctttgctgttgctcccgaaagccgtgctctccagcctggctgccagggagggtgggcctcttggttccaggctcttgaaatagtgcagccttttcttcctatctctgtggctttcagctctgcttccttggttattaggagaatagatgggtgatgtctttccttatgttgctttttcaacatagcagaattaatgtagggagctaaatccagtggtgtgtgtgaatgcagaagggaatgcaccccacattcccatgatggaagtctgcgtaaccaataaattgtgcctttctcactcaaaaaaaaaaaaaaaaaa

SEQ ID NO: 34 - DNA, 3879 bp, Homo sapiens
atcagacgcgcagaggaggcggggccgcggctggtttcctgccggggggcggctctgggccgccgagtcccctcctcccgcccctgaggaggaggagccgccgccacccgccgcgcccgacacccgggaggccccgccagcccgcgggagaggcccagcgggagtcgcggaacagcaggcccgagcccaccgcgccgggccccggacgccgcgcggaaaagatgaatttacaaccaattttctggattggactgatcagttcagtttgctgtgtgtttgctcaaacagatgaaaatagatgtttaaaagcaaatgccaaatcatgtggagaatgtatacaagcagggccaaattgtgggtggtgcacaaattcaacatttttacaggaaggaatgcctacttctgcacgatgtgatgatttagaagccttaaaaaagaagggttgccctccagatgacatagaaaatcccagaggctccaaagatataaagaaaaataaaaatgtaaccaaccgtagcaaaggaacagcagagaagctcaagccagaggatattactcagatccaaccacagcagttggttttgcgattaagatcaggggagccacagacatttacattaaaattcaagagagctgaagactatcccattgacctctactaccttatggacctgtcttactcaatgaaagacgatttggagaatgtaaaaagtcttggaacagatctgatgaatgaaatgaggaggattacttcggacttcagaattggatttggctcatttgtggaaaagactgtgatgccttacattagcacaacaccagctaagctcaggaacccttgcacaagtgaacagaactgcaccagcccatttagctacaaaaatgtgctcagtcttactaataaaggagaagtatttaatgaacttgttggaaaacagcgcatatctggaaatttggattctccagaaggtggtttcgatgccatcatgcaagttgcagtttgtggatcactgattggctggaggaatgttacacggctgctggtgttttccacagatgccgggtttcactttgctggagatgggaaacttggtggcattgttttaccaaatgatggacaatgtcacctggaaaataatatgtacacaatgagccattattatgattatccttctattgctcaccttgtccagaaactgagtgaaaataatattcagacaatttttgcagttactgaagaatttcagcctgtttacaaggagctgaaaaacttgatccctaagtcagcagtaggaacattatctgcaaattctagcaatgtaattcagttgatcattgatgcatacaattccctttcctcagaagtcattttggaaaacggcaaattgtcagaaggcgtaacaataagttacaaatcttactgcaagaacggggtgaatggaacaggggaaaatggaagaaaatgttccaatatttccattggagatgaggttcaatttgaaattagcataacttcaaataagtgtccaaaaaaggattctgacagctttaaaattaggcctctgggctttacggaggaagtagaggttattcttcagtacatctgtgaatgtgaatgccaaagcgaaggcatccctgaaagtcccaagtgtcatgaaggaaatgggacatttgagtgtggcgcgtgcaggtgcaatgaagggcgtgttggtagacattgtgaatgcagcacagatgaagttaacagtgaagacatggatgcttactgcaggaaagaaaacagttcagaaatctgcagtaacaatggagagtgcgtctgcggacagtgtgtttgtaggaagagggataatacaaatgaaatttattctggcaaattctgcgagtgtgataatttcaactgtgatagatccaatggcttaatttgtggaggaaatggtgtttgcaagtgtcgtgtgtgtgagtgcaaccccaactacactggcagtgcatgtgactgttctttggatactagtacttgtgaagccagcaacggacagatctgcaatggccggggcatctgcgagtgtggtgtctgtaagtgtacagatccgaagtttcaagggcaaacgtgtgagatgtgtcagacctgccttggtgtctgtgctgagcataaagaatgtgttcagtgcagagccttcaataaaggagaaaagaaagacacatgcacacaggaatgttcctattttaacattaccaaggtagaaagtcgggacaaattaccccagccggtccaacctgatcctgtgtcccattgtaaggagaaggatgttgacgactgttggttctattttacgtattcagtgaatgggaacaacgaggtcatggttcatgttgtggagaatccagagtgtcccactggtccagacatcattccaattgtagctggtgtggttgctggaattgttcttattggccttgcattactgctgatatggaagcttttaatgataattcatgacagaagggagtttgctaaatttgaaaaggagaaaatgaatgccaaatgggacacgggtgaaaatcctatttataagagtgccgtaacaactgtggtcaatccgaagtatgagggaaaatgagtactgcccgtgcaaatcccacaacactgaatgcaaagtagcaatttccatagtcacagttaggtagctttagggcaatattgccatggttttactcatgtgcaggttttgaaaatgtacaatatgtataatttttaaaatgttttattattttgaaaataatgttgtaattcatgccagggactgacaaaagacttgagacaggatggttactcttgtcagctaaggtcacattgtgcctttttgaccttttcttcctggactattgaaatcaagcttattggattaagtgatatttctatagcgattgaaagggcaatagttaaagtaatgagcatgatgagagtttctgttaatcatgtattaaaactgatttttagctttacaaatatgtcagtttgcagttatgcagaatccaaagtaaatgtcctgctagctagttaaggattgttttaaatctgttattttgctatttgcctgttagacatgactgatgacatatctgaaagacaagtatgttgagagttgctggtgtaaaatacgtttgaaatagttgatctacaaaggccatgggaaaaattcagagagttaggaaggaaaaaccaatagctttaaaacctgtgtgccattttaagagttacttaatgtttggtaacttttatgccttcactttacaaattcaagccttagataaaagaaccgagcaattttctgctaaaaagtccttgatttagcactatttacatacaggccatactttacaaagtatttgctgaatggggaccttttgagttgaatttattttattatttttattttgtttaatgtctggtgctttctgtcacctcttctaatcttttaatgtatttgtttgcaattttggggtaagactttttttatgagtactttttctttgaagttttagcggtcaatttgcctttttaatgaacatgtgaagttatactgtggctatgcaacagctctcacctacgcgagtcttactttgagttagtgccataacagaccactgtatgtttacttctcaccatttgagttgcccatcttgtttcacactagtcacattcttgttttaagtgcctttagttttaacagttcactttttacagtgctatttactgaagttatttattaaatatgcctaaaatacttaaatcggatgtcttgactctgatgtattttatcaggttgtgtgcatgaaatttttatagattaaagaagttgaggaaaagcaaaaaaaaaa

SEQ ID NO: 35 - DNA, 3392 bp, Homo sapiens
gcggagccagcccctcccctacccggagcagcccgctggggccgtcccgagcggcgacacactaggagtcccggccggccagccagggcagccgcggtcccgggactcggccgtgagtgctgcgggacggatggtggcggcggggcgcgggccagcgcgggcgccgtgagccggagctgcgcgcggggcatgcggctgcggcccccggccctcggcccccgcgctccggccccagccccggccgccggcccccgcggagtgcagcgaccgcgccgccgctgagggaggcgccccaccatgccgcgggccccggcgccgctgtacgcctgcctcctggggctctgcgcgctcctgccccggctcgcaggtctcaacatatgcactagtggaagtgccacctcatgtgaagaatgtctgctaatccacccaaaatgtgcctggtgctccaaagaggacttcggaagcccacggtccatcacctctcggtgtgatctgagggcaaaccttgtcaaaaatggctgtggaggtgagatagagagcccagccagcagcttccatgtcctgaggagcctgcccctcagcagcaagggttcgggctctgcaggctgggacgtcattcagatgacaccacaggagattgccgtgaacctccggcccggtgacaagaccaccttccagctacaggttcgccaggtggaggactatcctgtggacctgtactacctgatggacctctccctgtccatgaaggatgacttggacaatatccggagcctgggcaccaaactcgcggaggagatgaggaagctcaccagcaacttccggttgggatttgggtcttttgttgataaggacatctctcctttctcctacacggcaccgaggtaccagaccaatccgtgcattggttacaagttgtttccaaattgcgtcccctcctttgggttccgccatctgctgcctctcacagacagagtggacagcttcaatgaggaagttcggaaacagagggtgtcccggaaccgagatgcccctgaggggggctttgatgcagtactccaggcagccgtctgcaaggagaagattggctggcgaaaggatgcactgcatttgctggtgttcacaacagatgatgtgccccacatcgcattggatggaaaattgggaggcctggtgcagccacacgatggccagtgccacctgaacgaggccaacgagtacactgcatccaaccagatggactatccatcccttgccttgcttggagagaaattggcagagaacaacatcaacctcatctttgcagtgacaaaaaaccattatatgctgtacaagaattttacagccctgatacctggaacaacggtggagattttagatggagactccaaaaatattattcaactgattattaatgcatacaatagtatccggtctaaagtggagttgtcagtctgggatcagcctgaggatcttaatctcttctttactgctacctgccaagatggggtatcctatcctggtcagaggaagtgtgagggtctgaagattggggacacggcatcttttgaagtatcattggaggcccgaagctgtcccagcagacacacggagcatgtgtttgccctgcggccggtgggattccgggacagcctggaggtgggggtcacctacaactgcacgtgcggctgcagcgtggggctggaacccaacagtgccaggtgcaacgggagcgggacctatgtctgcggcctgtgtgagtgcagccccggctacctgggcaccaggtgcgagtgccaggatggggagaaccagagcgtgtaccagaacctgtgccgggaggcagagggcaagccactgtgcagcgggcgtggggactgcagctgcaaccagtgctcctgcttcgagagcgagttcggcaagatctatgggcctttctgtgagtgcgacaacttctcctgtgccaggaacaagggagtcctctgctcaggccatggcgagtgtcactgcggggaatgcaagtgccatgcaggttacatcggggacaactgtaactgctcgacagacatcagcacatgccggggcagagatggccagatctgcagcgagcgtgggcactgtctctgtgggcagtgccaatgcacggagccgggggcctttggggagatgtgtgagaagtgccccacctgcccggatgcatgcagcaccaagagagattgcgtcgagtgcctgctgctccactctgggaaacctgacaaccagacctgccacagcctatgcagggatgaggtgatcacatgggtggacaccatcgtgaaagatgaccaggaggctgtgctatgtttctacaaaaccgccaaggactgcgtcatgatgttcacctatgtggagctccccagtgggaagtccaacctgaccgtcctcagggagccagagtgtggaaacacccccaacgccatgaccatcctcctggctgtggtcggtagcatcctccttgttgggcttgcactcctggctatctggaagctgcttgtcaccatccacgaccggagggagtttgcaaagtttcagagcgagcgatccagggcccgctatgaaatggcttcaaatccattatacagaaagcctatctccacgcacactgtggacttcaccttcaacaagttcaacaaatcctacaatggcactgtggactgatgtttccttctccgaggggctggagcggggatctgatgaaaaggtcagactgaaacgccttgcacggctgctcggcttgatcacagctccctaggtaggcaccacagagaagaccttctagtgagcctgggccaggagcccacagtgcctgtacaggaaggtgcctggccatgtcacctggctgctaggccagagccatgccaggctgcgtccctccgagcttgggataaagcaaggggaccttggcactctcagctttccctgccacatccagcttgttgtcccaatgaaatactgagatgctgggctgtctctcccttccaggaatgctgggcccccagcctggccagacaagacgactgtcaggaagggtcggagtctgtaaaaccagcatacagtttggcttttttcacattgatcatttttatatgaaataaaaagatcctgcatttatggtgtagttctgagtcctgagacttttccgcgtgatggctatgccttgcacacaggtgttggtgatggggctgttgagatgcctgttgaaggtacatcgtttgcaaatgtcagtttcctctcctgtccgtgtttgtttagtacttttataatgaaaagaaacaagattgtttgggattggaagtaaagattaaaaccaaaagaatttgtgtttgtctgataaaaaaaaaaaaaaaaaaaaa

SEQ ID NO: 36 - DNA, 3338 bp, Homo sapiens
gacatcatgggctatttttaggggttgactggtagcagataagtgttgagctcgggctggataagggctcagagttgcactgagtgtggctgaagcagcgaggcgggagtggaggtgcgcggagtcaggcagacagacagacacagccagccagccaggtcggcagtatagtccgaactgcaaatcttattttcttttcaccttctctctaactgcccagagctagcgcctgtggctcccgggctggtgtttcgggagtgtccagagagcctggtctccagccgcccccgggaggagagccctgctgcccaggcgctgttgacagcggcggaaagcagcggtacccacgcgcccgccgggggaagtcggcgagcggctgcagcagcaaagaactttcccggctgggaggaccggagacaagtggcagagtcccggagcgaacttttgcaagcctttcctgcgtcttaggcttctccacggcggtaaagaccagaaggcggcggagagccacgcaagagaagaaggacgtgcgctcagcttcgctcgcaccggttgttgaacttgggcgagcgcgagccgcggctgccgggcgccccctccccctagcagcggaggaggggacaagtcgtcggagtccgggcggccaagacccgccgccggccggccactgcagggtccgcactgatccgctccgcggggagagccgctgctctgggaagtgagttcgcctgcggactccgaggaaccgctgcgcccgaagagcgctcagtgagtgaccgcgacttttcaaagccgggtagcgcgcgcgagtcgacaagtaagagtgcgggaggcatcttaattaaccctgcgctccctggagcgagctggtgaggagggcgcagcggggacgacagccagcgggtgcgtgcgctcttagagaaactttccctgtcaaaggctccggggggcgcgggtgtcccccgcttgccagagccctgttgcggccccgaaacttgtgcgcgcagcccaaactaacctcacgtgaagtgacggactgttctatgactgcaaagatggaaacgaccttctatgacgatgccctcaacgcctcgttcctcccgtccgagagcggaccttatggctacagtaaccccaagatcctgaaacagagcatgaccctgaacctggccgacccagtggggagcctgaagccgcacctccgcgccaagaactcggacctcctcacctcgcccgacgtggggctgctcaagctggcgtcgcccgagctggagcgcctgataatccagtccagcaacgggcacatcaccaccacgccgacccccacccagttcctgtgccccaagaacgtgacagatgagcaggagggcttcgccgagggcttcgtgcgcgccctggccgaactgcacagccagaacacgctgcccagcgtcacgtcggcggcgcagccggtcaacggggcaggcatggtggctcccgcggtagcctcggtggcagggggcagcggcagcggcggcttcagcgccagcctgcacagcgagccgccggtctacgcaaacctcagcaacttcaacccaggcgcgctgagcagcggcggcggggcgccctcctacggcgcggccggcctggcctttcccgcgcaaccccagcagcagcagcagccgccgcaccacctgccccagcagatgcccgtgcagcacccgcggctgcaggccctgaaggaggagcctcagacagtgcccgagatgcccggcgagacaccgcccctgtcccccatcgacatggagtcccaggagcggatcaaggcggagaggaagcgcatgaggaaccgcatcgctgcctccaagtgccgaaaaaggaagctggagagaatcgcccggctggaggaaaaagtgaaaaccttgaaagctcagaactcggagctggcgtccacggccaacatgctcagggaacaggtggcacagcttaaacagaaagtcatgaaccacgttaacagtgggtgccaactcatgctaacgcagcagttgcaaacattttgaagagagaccgtcgggggctgaggggcaacgaagaaaaaaaataacacagagagacagacttgagaacttgacaagttgcgacggagagaaaaaagaagtgtccgagaactaaagccaagggtatccaagttggactgggttgcgtcctgacggcgcccccagtgtgcacgagtgggaaggacttggcgcgccctcccttggcgtggagccagggagcggccgcctgcgggctgccccgctttgcggacgggctgtccccgcgcgaacggaacgttggacttttcgttaacattgaccaagaactgcatggacctaacattcgatctcattcagtattaaaggggggagggggagggggttacaaactgcaatagagactgtagattgcttctgtagtactccttaagaacacaaagcggggggagggttggggaggggcggcaggagggaggtttgtgagagcgaggctgagcctacagatgaactctttctggcctgccttcgttaactgtgtatgtacatatatatattttttaatttgatgaaagctgattactgtcaataaacagcttcatgcctttgtaagttatttcttgtttgtttgtttgggtatcctgcccagtgttgtttgtaaataagagatttggagcactctgagtttaccatttgtaataaagtatataatttttttatgttttgtttctgaaaattccagaaaggatatttaagaaaatacaataaactattggaaagtactcccctaacctcttttctgcatcatctgtagatactagctatctaggtggagttgaaagagttaagaatgtcgattaaaatcactctcagtgcttcttactattaagcagtaaaaactgttctctattagactttagaaataaatgtacctgatgtacctgatgctatggtcaggttatactcctcctcccccagctatctatatggaattgcttaccaaaggatagtgcgatgtttcaggaggctggaggaaggggggttgcagtggagagggacagcccactgagaagtcaaacatttcaaagtttggattgtatcaagtggcatgtgctgtgaccatttataatgttagtagaaattttacaataggtgcttattctcaaagcaggaattggtggcagattttacaaaagatgtatccttccaatttggaatcttctctttgacaattcctagataaaaagatggcctttgcttatgaatatttataacagcattcttgtcacaataaatgtattcaaataccaaaaaaaaaaaaaaaaa

SEQ ID NO: 37 - DNA, 1832 bp, Homo sapiens
gagcggccaggccagcctcggagccagcagggagctgggagctgggggaaacgacgccaggaaagctatcgcgccagagagggcgacgggggctcgggaagcctgacagggcttttgcgcacagctgccggctggctgctacccgcccgcgccagcccccgagaacgcgcgaccaggcacccagtccggtcaccgcagcggagagctcgccgctcgctgcagcgaggcccggagcggccccgcagggaccctccccagaccgcctgggccgcccggatgtgcactaaaatggaacagcccttctaccacgacgactcatacacagctacgggatacggccgggcccctggtggcctctctctacacgactacaaactcctgaaaccgagcctggcggtcaacctggccgacccctaccggagtctcaaagcgcctggggctcgcggacccggcccagagggcggcggtggcggcagctacttttctggtcagggctcggacaccggcgcgtctctcaagctcgcctcttcggagctggaacgcctgattgtccccaacagcaacggcgtgatcacgacgacgcctacacccccgggacagtacttttacccccgcgggggtggcagcggtggaggtgcagggggcgcagggggcggcgtcaccgaggagcaggagggcttcgccgacggctttgtcaaagccctggacgatctgcacaagatgaaccacgtgacaccccccaacgtgtccctgggcgctaccggggggcccccggctgggcccgggggcgtctacgccggcccggagccacctcccgtttacaccaacctcagcagctactccccagcctctgcgtcctcgggaggcgccggggctgccgtcgggaccgggagctcgtacccgacgaccaccatcagctacctcccacacgcgccgcccttcgccggtggccacccggcgcagctgggcttgggccgcggcgcctccaccttcaaggaggaaccgcagaccgtgccggaggcgcgcagccgggacgccacgccgccggtgtcccccatcaacatggaagaccaagagcgcatcaaagtggagcgcaagcggctgcggaaccggctggcggccaccaagtgccggaagcggaagctggagcgcatcgcgcgcctggaggacaaggtgaagacgctcaaggccgagaacgcggggctgtcgagtaccgccggcctcctccgggagcaggtggcccagctcaaacagaaggtcatgacccacgtcagcaacggctgtcagctgctgcttggggtcaagggacacgccttctgaacgtcccctgcccctttacggacaccccctcgcttggacggctgggcacacgcctcccactggggtccagggagcaggcggtgggcacccaccctgggacctaggggcgccgcaaaccacactggactccggccctcctaccctgcgcccagtccttccacctcgacgtttacaagcccccccttccacttttttttgtatgttttttttctgctggaaacagactcgattcatattgaatataatatatttgtgtatttaacagggaggggaagagggggcgatcgcggcggagctggccccgccgcctggtactcaagcccgcggggacattgggaaggggacccccgccccctgccctcccctctctgcaccgtactgtggaaaagaaacacgcacttagtctctaaagagtttattttaagacgtgtttgtgtttgtgtgtgtttgttctttttattgaatctatttaagtaaaaaaaaaattggttctttaaaaaaaaaaaaaaaaa

SEQ ID NO: 38 - DNA, 2187 bp, Homo sapiens
gtcctttctagacagccccctcctccaggctcagggacctgtctggctgtgagctcccaggaggtcccaggggtgtgacctccctccctccctccctccctcttcccttcaccccaggccagcccagggccagctataaagctggcccagcctggctctcagcacacccagctgcctgagaccctccttcaacctccctagaggacagccccactctgcctcctgctcccccagggcagcaccatgtggcccctgtggctctgctgggcactctgggtgctgcccctggctggccccggggcggccctgaccgaggagcagctcctgggcagcctgctgcggcagctgcagctcagcgaggtgcccgtactggacagggccgacatggagaagctggtcatccccgcccacgtgagggcccagtatgtagtcctgctgcggcgcagccacggggaccgctcccgcggaaagaggttcagccagagcttccgagaggtggccggcaggttcctggcgtcggaggccagcacacacctgctggtgttcggcatggagcagcggctgccgcccaacagcgagctggtgcaggccgtgctgcggctcttccaggagccggtccccaaggccgcgctgcacaggcacgggcggctgtccccgcgcagcgcccaggcccgggtgaccgtcgagtggctgcgcgtccgcgacgacggctccaaccgcacctccctcatcgactccaggctggtgtccgtccacgagagcggctggaaggccttcgacgtgaccgaggccgtgaacttctggcagcagctgagccggccccggcagccgctgctgctacaggtgtcggtgcagagggagcatctgggcccgctggcgtccggcgcccacaagctggtccgctttgcctcgcagggggcgccagccgggcttggggagccccagctggagctgcacaccctggacctcagggactatggagctcagggcgactgtgaccctgaagcaccaatgaccgagggcacccgctgctgccgccaggagatgtacattgacctgcaggggatgaagtgggccaagaactgggtgctggagcccccgggcttcctggcttacgagtgtgtgggcacctgccagcagcccccggaggccctggccttcaattggccatttctggggccgcgacagtgtatcgcctcggagactgcctcgctgcccatgatcgtcagcatcaaggagggaggcaggaccaggccccaggtggtcagcctgcccaacatgagggtgcagaagtgcagctgtgcctcggatggggcgctcgtgccaaggaggctccagccataggcgcctggtgtatccattgagccctctaactgaacgtgtgcatagaggtggtcttaatgtaggtcttaactttatacttagcaagttactccatcccaatttagtgctcctgtgtgaccttcgccctgtgtccttccatttcctgtctttcccgtccatcacccatcctaagcacttacgtgagtaaataatgcagctcagatgctgagctctagtaggaaatgctggcatgctgattacaagatacagctgagcaatgcacacattttcagctgggagtttctgttctctggcaaattcttcactgagtctggaacaataataccctatgattagaactggggaaacagaactgaattgctgtgttatatgaggaattaaaaccttcaaatctctatttcccccaaatactgacccattctggacttttgtaaacatacctaggcccctgttcccctgagagggtgctaagaggaaggatgaagggcttcaggctgggggcagtggacagggaattgggatacctggattctggttctgacagggccacaagctaggatctctaacaaacgcagaaggctttggctcgtcatttcctcttaaaaaggaggagctgggcttcagctctaagaacttcattgccctggggatcagacagcccctacctacccctgcccactcctctggagactgagccttgcccgtgcatatttaggtcatttcccacactgtcttagagaacttgtcaccagaaaccacatgtatttgcatgttttttgttaatttagctaaagcaattgaatgtagatactcagaagaaataaaaaatgatgtttcactctg

SEQ ID NO: 39 - DNA, 2048 bp, Homo sapiens
cctggcccgggagggtataagtgcggcccgcgcccctccgagcggcgcgctgggttccggagcgatggccacagccgagtcccgtgcgctccagtttgccgagggcgccgcgtttccagcgtaccgggccccccacgccggcggggcgctcctgccgcccccgagccctgcggcagccctgctccctgcgccgcccgcgggccccggcccagcgacctttgcgggcttcctcggccgggaccccgggccggccccgccgccccccgccagcctgggctcgcctgcgccccccaaaggcgcggccgccccgtcggcgtcgcagcgccgcaagcgcacgtctttcagcgccgaacagctgcagctgctggagctcgtcttccgccggacccggtaccccgacatccacttgcgcgagcgcctggccgcgctcaccctgctccccgagtccaggatccagcttttattttctcccctcttccaggtatggttccagaacaggcgtgccaagtctcggcgtcagagtgggaaatccttccaacctttggctaggccggagattatcctcaaccactgtgctcctggaactgaaacgaaatgtctgaagccccagctgcctcttgaggtagatgtgaactgcctgcccgaaccaaacggggttggagggggcatctctgactctagctcccaaggtcagaattttgaaacctgttcccctctctctgaagacattggttcaaagctggactcatgggaggaacacatcttttctgcctttggtaacttttgaggattctgggagaattcgggataagctctgaggagccatgactgacagcctgggagagacacatcagcatactgtcctttctgacttccatgctaaggacatgtccttgttaaccttgatgatggttttgacagcacctctcacatttgaaggtaccccgccactttgtcaatgacgttttaagcccacactcccaccccagagttcccgcattcgtttttacctgtgttctctccaagcctgcacattccattggtctgcatccctatgccttcttgccaggcctgtttttagtttttggactggttgttcagaactcattattttcttcacaagaatgcctcagcttgactcagtttccccttgtgtttgacagctgccattttctcctggtccctccaaggcttataatcttaaagtcactctaccccgtctcttcaaccctcatcctaggtttattactttttaaaattgggcctgtcatcttcacgttcaatcatagctccaatgactctgcatgcagattatttcgacagcccccttgcctctagcttctcaactacttaaaaaaaattaccctctgtgggccaggtgcagtggctcactcctgcaatctcagcactttgggaggccgagtgggtggatcacctgaagtcaggagttcaagaccagcctggccaatatggcgaaaccccatctctgctaaaaatataaaacttagctgggcacggtgacgggagcctgtagtcccagctactcaggaggctgaggcaggagaatcacttgagcctgggaggtggaggttgcagtgatctaagatcgtgccactgcacttcagcctgggagacagagggaggctctcaaaaaaaaaaaaaaaaaaaaaaaaaattactctatggttctgtggtagcctccagttgctaccaaattataaaaagctttcagttaccctcccagataactgatatcatccttagcctgcaggacagctatgcaaatctgaaggtcaactatccacaatatatgctttggtcttaaagtcactcctttcagttttgaaccaaattcataccttttgctttcaaaacactcgaggactccccacctgccttctgaagtctgaaattttctctaagtaatcctgattttgcacctgttacttcgatcactccattacccttagcacttgttattgtacttcctgtgcaagttttgtggattattaaatgtctttcacaaatgtaaaaaaaaaaaaaaaaaa

SEQ ID NO: 40 - DNA, 2735 bp, Homo sapiens
acaacagtccccaggcatcaccattcaagatgcatccaggggtcctggctgccttcctcttcttgagctggactcattgtcgggccctgccccttcccagtggtggtgatgaagatgatttgtctgaggaagacctccagtttgcagagcgctacctgagatcatactaccatcctacaaatctcgcgggaatcctgaaggagaatgcagcaagctccatgactgagaggctccgagaaatgcagtctttcttcggcttagaggtgactggcaaacttgacgataacaccttagatgtcatgaaaaagccaagatgcggggttcctgatgtgggtgaatacaatgttttccctcgaactcttaaatggtccaaaatgaatttaacctacagaattgtgaattacacccctgatatgactcattctgaagtcgaaaaggcattcaaaaaagccttcaaagtttggtccgatgtaactcctctgaattttaccagacttcacgatggcattgctgacatcatgatctcttttggaattaaggagcatggcgacttctacccatttgatgggccctctggcctgctggctcatgcttttcctcctgggccaaattatggaggagatgcccattttgatgatgatgaaacctggacaagtagttccaaaggctacaacttgtttcttgttgctgcgcatgagttcggccactccttaggtcttgaccactccaaggaccctggagcactcatgtttcctatctacacctacaccggcaaaagccactttatgcttcctgatgacgatgtacaagggatccagtctctctatggtccaggagatgaagaccccaaccctaaacatccaaaaacgccagacaaatgtgacccttccttatcccttgatgccattaccagtctccgaggagaaacaatgatctttaaagacagattcttctggcgcctgcatcctcagcaggttgatgcggagctgtttttaacgaaatcattttggccagaacttcccaaccgtattgatgctgcatatgagcacccttctcatgacctcatcttcatcttcagaggtagaaaattttgggctcttaatggttatgacattctggaaggttatcccaaaaaaatatctgaactgggtcttccaaaagaagttaagaagataagtgcagctgttcactttgaggatacaggcaagactctcctgttctcaggaaaccaggtctggagatatgatgatactaaccatattatggataaagactatccgagactaatagaagaagacttcccaggaattggtgataaagtagatgctgtctatgagaaaaatggttatatctattttttcaacggacccatacagtttgaatacagcatctggagtaaccgtattgttcgcgtcatgccagcaaattccattttgtggtgttaagtgtctttttaaaaattgttatttaaatcctgaagagcatttggggtaatacttccagaagtgcggggtaggggaagaagagctatcaggagaaagcttggttctgtgaacaagcttcagtaagttatctttgaatatgtagtatctatatgactatgcgtggctggaaccacattgaagaatgttagagtaatgaaatggaggatctctaaagagcatctgattcttgttgctgtacaaaagcaatggttgatgatacttcccacaccacaaatgggacacatggtctgtcaatgagagcataatttaaaaatatatttataaggaaattttacaagggcataaagtaaatacatgcatataatgaataaatcattcttactaaaaagtataaaatagtatgaaaatggaaatttgggagagccatacataaaagaaataaaccaaaggaaaatgtctgtaataatagactgtaacttccaaataaataattttcattttgcactgaggatattcagatgtatgtgcccttcttcacacagacactaacgaaatatcaaagtcattaaagacaggagacaaaagagcagtggtaagaatagtagatgtggcctttgaattctgtttaattttcacttttggcaatgactcaaagtctgctctcatataagacaaatattcctttgcatattataaaggataaagaaggatgatgtctttttattaaaatatttcaggttcttcagaagtcacacattacaaagttaaaattgttatcaaaatagtctaaggccatggcatccctttttcataaattatttgattatttaagactaaaagttgcattttaaccctattttacctagctaattatttaattgtccagtttgtcttggatatataggctattttctaaagacttgtatagcatgaaataaaatatatcttataaagtggaagtatgtatattaaaaaagagacatccaaatttttttttaaagcagtctactagattgtgatcccttgagatatggaaggatgcctttttttctctgcatttaaaaaaatcccccagcacttcccacagtgcctattgatacttggggagggtgcttggcacttattgaatatatgatcggccatcaagggaagaactattgtgctcagagacactgttgataaaaactcaggcaaagaaaatgaaatgcatatttgcaaagtgtattaggaagtgtttatgttgtttataataaaaatatattttcaacagacaaaaaaaaaaaaaaaaaa

SEQ ID NO: 41 - DNA, 3549 bp, Homo sapiens
acatctggcggctgccctcccttgtttccgctgcatccagacttcctcaggcggtggctggaggctgcgcatctggggctttaaacatacaaagggattgccaggacctgcggcggcggcggcggcggcgggggctggggcgcgggggccggaccatgagccgctgagccgggcaaaccccaggccaccgagccagcggaccctcggagcgcagccctgcgccgcggagcaggctccaaccaggcggcgaggcggccacacgcaccgagccagcgacccccgggcgacgcgcggggccagggagcgctacgatggaggcgctaatggcccggggcgcgctcacgggtcccctgagggcgctctgtctcctgggctgcctgctgagccacgccgccgccgcgccgtcgcccatcatcaagttccccggcgatgtcgcccccaaaacggacaaagagttggcagtgcaatacctgaacaccttctatggctgccccaaggagagctgcaacctgtttgtgctgaaggacacactaaagaagatgcagaagttctttggactgccccagacaggtgatcttgaccagaataccatcgagaccatgcggaagccacgctgcggcaacccagatgtggccaactacaacttcttccctcgcaagcccaagtgggacaagaaccagatcacatacaggatcattggctacacacctgatctggacccagagacagtggatgatgcctttgctcgtgccttccaagtctggagcgatgtgaccccactgcggttttctcgaatccatgatggagaggcagacatcatgatcaactttggccgctgggagcatggcgatggatacccctttgacggtaaggacggactcctggctcatgccttcgccccaggcactggtgttgggggagactcccattttgatgacgatgagctatggaccttgggagaaggccaagtggtccgtgtgaagtatgggaacgccgatggggagtactgcaagttccccttcttgttcaatggcaaggagtacaacagctgcactgataccggccgcagcgatggcttcctctggtgctccaccacctacaactttgagaaggatggcaagtacggcttctgtccccatgaagccctgttcaccatgggcggcaacgctgaaggacagccctgcaagtttccattccgcttccagggcacatcctatgacagctgcaccactgagggccgcacggatggctaccgctggtgcggcaccactgaggactacgaccgcgacaagaagtatggcttctgccctgagaccgccatgtccactgttggtgggaactcagaaggtgccccctgtgtcttccccttcactttcctgggcaacaaatatgagagctgcaccagcgccggccgcagtgacggaaagatgtggtgtgcgaccacagccaactacgatgatgaccgcaagtggggcttctgccctgaccaagggtacagcctgttcctcgtggcagcccacgagtttggccacgccatggggctggagcactcccaagaccctggggccctgatggcacccatttacacctacaccaagaacttccgtctgtcccaggatgacatcaagggcattcaggagctctatggggcctctcctgacattgaccttggcaccggccccacccccacgctgggccctgtcactcctgagatctgcaaacaggacattgtatttgatggcatcgctcagatccgtggtgagatcttcttcttcaaggaccggttcatttggcggactgtgacgccacgtgacaagcccatggggcccctgctggtggccacattctggcctgagctcccggaaaagattgatgcggtatacgaggccccacaggaggagaaggctgtgttctttgcagggaatgaatactggatctactcagccagcaccctggagcgagggtaccccaagccactgaccagcctgggactgccccctgatgtccagcgagtggatgccgcctttaactggagcaaaaacaagaagacatacatctttgctggagacaaattctggagatacaatgaggtgaagaagaaaatggatcctggcttccccaagctcatcgcagatgcctggaatgccatccccgataacctggatgccgtcgtggacctgcagggcggcggtcacagctacttcttcaagggtgcctattacctgaagctggagaaccaaagtctgaagagcgtgaagtttggaagcatcaaatccgactggctaggctgctgagctggccctggctcccacaggcccttcctctccactgccttcgatacaccgggcctggagaactagagaaggacccggaggggcctggcagccgtgccttcagctctacagctaatcagcattctcactcctacctggtaatttaagattccagagagtggctcctcccggtgcccaagaatagatgctgactgtactcctcccaggcgccccttccccctccaatcccaccaaccctcagagccacccctaaagagatactttgatattttcaacgcagccctgctttgggctgccctggtgctgccacacttcaggctcttctcctttcacaaccttctgtggctcacagaacccttggagccaatggagactgtctcaagagggcactggtggcccgacagcctggcacagggcagtgggacagggcatggccaggtggccactccagacccctggcttttcactgctggctgccttagaacctttcttacattagcagtttgctttgtatgcactttgtttttttctttgggtcttgttttttttttccacttagaaattgcatttcctgacagaaggactcaggttgtctgaagtcactgcacagtgcatctcagcccacatagtgatggttcccctgttcactctacttagcatgtccctaccgagtctcttctccactggatggaggaaaaccaagccgtggcttcccgctcagccctccctgcccctcccttcaaccattccccatgggaaatgtcaacaagtatgaataaagacacctactgagtggccgtgtttgccatctgttttagcagagcctagacaagggccacagacccagccagaagcggaaacttaaaaagtccgaatctctgctccctgcagggcacaggtgatggtgtctgctggaaaggtcagagcttccaaagtaaacagcaagagaacctcagggagagtaagctctagtccctctgtcctgtagaaagagccctgaagaatcagcaattttgttgctttattgtggcatctgttcgaggtttgcttcctctttaagtctgtttcttcattagcaatcatatcagttttaatgctactactaacaatgaacagtaacaataatatccccctcaattaatagagtgctttctatgtgcaaggcacttttcacgtgtcacctattttaacctttccaaccacataaataaaaaaggccattattagttgaaaaaaaaaaaaaaaaaaaaaaaaa

SEQ ID NO: 42 - DNA, 2387 bp, Homo sapiens
agacacctctgccctcaccatgagcctctggcagcccctggtcctggtgctcctggtgctgggctgctgctttgctgcccccagacagcgccagtccacccttgtgctcttccctggagacctgagaaccaatctcaccgacaggcagctggcagaggaatacctgtaccgctatggttacactcgggtggcagagatgcgtggagagtcgaaatctctggggcctgcgctgctgcttctccagaagcaactgtccctgcccgagaccggtgagctggatagcgccacgctgaaggccatgcgaaccccacggtgcggggtcccagacctgggcagattccaaacctttgagggcgacctcaagtggcaccaccacaacatcacctattggatccaaaactactcggaagacttgccgcgggcggtgattgacgacgcctttgcccgcgccttcgcactgtggagcgcggtgacgccgctcaccttcactcgcgtgtacagccgggacgcagacatcgtcatccagtttggtgtcgcggagcacggagacgggtatcccttcgacgggaaggacgggctcctggcacacgcctttcctcctggccccggcattcagggagacgcccatttcgacgatgacgagttgtggtccctgggcaagggcgtcgtggttccaactcggtttggaaacgcagatggcgcggcctgccacttccccttcatcttcgagggccgctcctactctgcctgcaccaccgacggtcgctccgacggcttgccctggtgcagtaccacggccaactacgacaccgacgaccggtttggcttctgccccagcgagagactctacacccaggacggcaatgctgatgggaaaccctgccagtttccattcatcttccaaggccaatcctactccgcctgcaccacggacggtcgctccgacggctaccgctggtgcgccaccaccgccaactacgaccgggacaagctcttcggcttctgcccgacccgagctgactcgacggtgatggggggcaactcggcgggggagctgtgcgtcttccccttcactttcctgggtaaggagtactcgacctgtaccagcgagggccgcggagatgggcgcctctggtgcgctaccacctcgaactttgacagcgacaagaagtggggcttctgcccggaccaaggatacagtttgttcctcgtggcggcgcatgagttcggccacgcgctgggcttagatcattcctcagtgccggaggcgctcatgtaccctatgtaccgcttcactgaggggccccccttgcataaggacgacgtgaatggcatccggcacctctatggtcctcgccctgaacctgagccacggcctccaaccaccaccacaccgcagcccacggctcccccgacggtctgccccaccggaccccccactgtccacccctcagagcgccccacagctggccccacaggtcccccctcagctggccccacaggtccccccactgctggcccttctacggccactactgtgcctttgagtccggtggacgatgcctgcaacgtgaacatcttcgacgccatcgcggagattgggaaccagctgtatttgttcaaggatgggaagtactggcgattctctgagggcagggggagccggccgcagggccccttccttatcgccgacaagtggcccgcgctgccccgcaagctggactcggtctttgaggagcggctctccaagaagcttttcttcttctctgggcgccaggtgtgggtgtacacaggcgcgtcggtgctgggcccgaggcgtctggacaagctgggcctgggagccgacgtggcccaggtgaccggggccctccggagtggcagggggaagatgctgctgttcagcgggcggcgcctctggaggttcgacgtgaaggcgcagatggtggatccccggagcgccagcgaggtggaccggatgttccccggggtgcctttggacacgcacgacgtcttccagtaccgagagaaagcctatttctgccaggaccgcttctactggcgcgtgagttcccggagtgagttgaaccaggtggaccaagtgggctacgtgacctatgacatcctgcagtgccctgaggactagggctcccgtcctgctttggcagtgccatgtaaatccccactgggaccaaccctggggaaggagccagtttgccggatacaaactggtattctgttctggaggaaagggaggagtggaggtgggctgggccctctcttctcacctttgttttttgttggagtgtttctaataaacttggattctctaacctttaaaaaaaaaaaaaaaaaaaaaaaaaaaaaaaaaaaaaaaaaaaaaaaaaaaa

SEQ ID NO: 43 - DNA, 2224 bp, Homo sapiens
tcccgtctccgcagcaaaaaagtttgagtcgccgctgccgggttgccagcggagtcgcgcgtcgggagctacgtagggcagagaagtcatggcttctccgtccaaaggcaatgacttgttttcgcccgacgaggagggcccagcagtggtggccggaccaggcccggggcctgggggcgccgagggggccgcggaggagcgccgcgtcaaggtctccagcctgcccttcagcgtggaggcgctcatgtccgacaagaagccgcccaaggaggcgtccccgctgccggccgaaagcgcctcggccggggccaccctgcggccactgctgctgtcggggcacggcgctcgggaagcgcacagccccgggccgctggtgaagcccttcgagaccgcctcggtcaagtcggaaaattcagaagatggagcggcgtggatgcaggaacccggccgatattcgccgccgccaagacatatgagccctaccacctgcaccctgaggaaacacaagaccaatcggaagccgcgcacgccctttaccacatcccagctcctcgccctggagcgcaagttccgtcagaaacagtacctctccattgcagagcgtgcagagttctccagctctctgaacctcacagagacccaggtcaaaatctggttccagaaccgaagggccaaggcgaaaagactgcaggaggcagaactggaaaagctgaaaatggctgcaaaacctatgctgccctccagcttcagtctccctttccccatcagctcgcccctgcaggcagcgtccatatatggagcatcctacccgttccatagacctgtgcttcccatcccgcctgtgggactctatgccacgccagtgggatatggcatgtaccacctgtcctaaggaagaccagatcaatagactccatgatggatgcttgtttcaaagggtttcctctccctctccacgaaggcagtaccagccagtactcctgctctgctaaccctgcgtgcaccaccctaagcggctaggctgacagggccacacgacatagctgaaatttgttctgtaggcggaggcaccaagccctgttttcttggtgtaatcttccagatgcccccttttcctttcacaaagattggctctgatggtttttatgtataaatatatatatataataaaatataatacatttttatacagcagacgtaaaaattcaaattattttaaaaggcaaaatttatatacatatgtgctttttttctatatctcaccttcccaaaagacactgtgtaagtccatttgttgtattttcttaaagagggagacaaattatttgcaaaatgtgctaaagtcaatgatttttacgggattattgacttctgcttatggaaaacaaagaaacagacacaatgcacacagaaaatattagatatggagagattattcaaagtgaaggggacacatcatatttctgcattttacttgcattaaaagaaacctctttatatactacagttgttcctatctctcccccgccccccaccgccccaccacacacatatttttaaagtttttccttttttaagaatatttttgtaagaccaatacctgggatgagaagaatcctgagactgcctggaggtgaggtagaaaattagaaatacttcctaattcttctcaaggctgttggtaactttatttcagataattggagagtaaaatgttaaaacctgttgagaggaattgatggtttctgagaaatactaggtacattcatcctcacagattgcaaaggtgatttgggtgggggtttagtaattttctgcttaaaaaatgagtatcttgtaaccattacctatatgctaaatattcttgaacaattagtagatccagaaagaaaaaaaaatatgctttctctgtgtgtgtacctgttgtatgtcctaaacttattagaaaattttatatacttttttacatgttggggggcagaaggtaaagccatgttttgacttggtgaaaatgggattgtcaaacagcccattaagttccctggtatttcaccttcctgtccatctgtcccctccctccggtatacctttatccctttgaaagggtgcttgtacaatttgatatattttattgaagagttatctcttattctgaattaaattaagcatttgttttattgcagtaaagtttgtccaaactcacaattaaaaaaaaaaaaaaaaa

SEQ ID NO: 44 - DNA, 2379 bp, Homo sapiens
gacccccgagctgtgctgctcgcggccgccaccgccgggccccggccgtccctggctcccctcctgcctcgagaagggcagggcttctcagaggcttggcgggaaaaagaacggagggagggatcgcgctgagtataaaagccggttttcggggctttatctaactcgctgtagtaattccagcgagaggcagagggagcgagcgggcggccggctagggtggaagagccgggcgagcagagctgcgctgcgggcgtcctgggaagggagatccggagcgaatagggggcttcgcctctggcccagccctcccgctgatcccccagccagcggtccgcaacccttgccgcatccacgaaactttgcccatagcagcgggcgggcactttgcactggaacttacaacacccgagcaaggacgcgactctcccgacgcggggaggctattctgcccatttggggacacttccccgccgctgccaggacccgcttctctgaaaggctctccttgcagctgcttagacgctggatttttttcgggtagtggaaaaccagcagcctcccgcgacgatgcccctcaacgttagcttcaccaacaggaactatgacctcgactacgactcggtgcagccgtatttctactgcgacgaggaggagaacttctaccagcagcagcagcagagcgagctgcagcccccggcgcccagcgaggatatctggaagaaattcgagctgctgcccaccccgcccctgtcccctagccgccgctccgggctctgctcgccctcctacgttgcggtcacacccttctcccttcggggagacaacgacggcggtggcgggagcttctccacggccgaccagctggagatggtgaccgagctgctgggaggagacatggtgaaccagagtttcatctgcgacccggacgacgagaccttcatcaaaaacatcatcatccaggactgtatgtggagcggcttctcggccgccgccaagctcgtctcagagaagctggcctcctaccaggctgcgcgcaaagacagcggcagcccgaaccccgcccgcggccacagcgtctgctccacctccagcttgtacctgcaggatctgagcgccgccgcctcagagtgcatcgacccctcggtggtcttcccctaccctctcaacgacagcagctcgcccaagtcctgcgcctcgcaagactccagcgccttctctccgtcctcggattctctgctctcctcgacggagtcctccccgcagggcagccccgagcccctggtgctccatgaggagacaccgcccaccaccagcagcgactctgaggaggaacaagaagatgaggaagaaatcgatgttgtttctgtggaaaagaggcaggctcctggcaaaaggtcagagtctggatcaccttctgctggaggccacagcaaacctcctcacagcccactggtcctcaagaggtgccacgtctccacacatcagcacaactacgcagcgcctccctccactcggaaggactatcctgctgccaagagggtcaagttggacagtgtcagagtcctgagacagatcagcaacaaccgaaaatgcaccagccccaggtcctcggacaccgaggagaatgtcaagaggcgaacacacaacgtcttggagcgccagaggaggaacgagctaaaacggagcttttttgccctgcgtgaccagatcccggagttggaaaacaatgaaaaggcccccaaggtagttatccttaaaaaagccacagcatacatcctgtccgtccaagcagaggagcaaaagctcatttctgaagaggacttgttgcggaaacgacgagaacagttgaaacacaaacttgaacagctacggaactcttgtgcgtaaggaaaagtaaggaaaacgattccttctaacagaaatgtcctgagcaatcacctatgaacttgtttcaaatgcatgatcaaatgcaacctcacaaccttggctgagtcttgagactgaaagatttagccataatgtaaactgcctcaaattggactttgggcataaaagaacttttttatgcttaccatcttttttttttctttaacagatttgtatttaagaattgtttttaaaaaattttaagatttacacaatgtttctctgtaaatattgccattaaatgtaaataactttaataaaacgtttatagcagttacacagaatttcaatcctagtatatagtacctagtattataggtactataaaccctaattttttttatttaagtacattttgctttttaaagttgatttttttctattgtttttagaaaaaataaaataactggcaaatatatcattgagccaaatcttaaaaaaaaaaaaaaa

SEQ ID NO: 45 - DNA, 1669 bp, Homo sapiens
gctcctgtcatcgaggcccctggcccaatggcaggctgagtccccctcctctggcctggtcccgcctctcctgccccttgtgctcagcgctacctgctgcccggacacatccagagctggccgacgggtgcgcgggcgggcggcggcaccatgcagggaagctgccaggggccgtgggcagcgccgctttctgccgcccacctggcgctgtgagactggcgctgccaccatgttccccagccctgctctcacgcccacgcccttctcagtcaaagacatcctaaacctggaacagcagcagcgcagcctggctgccgccggagagctctctgcccgcctggaggcgaccctggcgccctcctcctgcatgctggccgccttcaagccagaggcctacgctgggcccgaggcggctgcgccgggcctcccagagctgcgcgcagagctgggccgcgcgccttcaccggccaagtgtgcgtctgcctttcccgccgcccccgccttctatccacgtgcctacagcgaccccgacccagccaaggaccctagagccgaaaagaaagagctgtgcgcgctgcagaaggcggtggagctggagaagacagaggcggacaacgcggagcggccccgggcgcgacggcggaggaagccgcgcgtgctcttctcgcaggcgcaggtctatgagctggagcggcgcttcaagcagcagcggtacctgtcggcccccgaacgcgaccagctggccagcgtgctgaaactcacgtccacgcaggtcaagatctggttccagaaccggcgctacaagtgcaagcggcagcggcaggaccagactctggagctggtggggctgcccccgccgccgccgccgcctgcccgcaggatcgcggtgccagtgctggtgcgcgatggcaagccatgcctaggggactcggcgccctacgcgcctgcctacggcgtgggcctcaatccctacggttataacgcctaccccgcctatccgggttacggcggcgcggcctgcagccctggctacagctgcactgccgcttaccccgccgggccttccccagcgcagccggccactgccgccgccaacaacaacttcgtgaacttcggcgtcggggacttgaatgcggttcagagccccgggattccgcagagcaactcgggagtgtccacgctgcatggtatccgagcctggtagggaagggacccgcgtggcgcgaccctgaccgatcccacctcaacagctccctgactctcggggggagaaggggctcccaacatgaccctgagtcccctggattttgcattcactcctgcggagacctaggaactttttctgtcccacgcgcgtttgttcttgcgcacgggagagtttgtggcggcgattatgcagcgtgcaatgagtgatcctgcagcctggtgtcttagctgtccccccaggagtgccctccgagagtccatgggcacccccggttggaactgggactgagctcgggcacgcagggcctgagatctggccgcccattccgcgagccagggccgggcgcccgggcctttgctatctcgccgtcgcccgcccacgcacccacccgtatttatgtttttacctattgctgtaagaaatgacgatccccttcccattaaagagagtgcgttgaccccg

SEQ ID NO: 46 - DNA, 2086 bp, Homo sapiens
ataagggctggaggtgctgctttcaggcctggccagcccaccatgcacgcccactgcctgcccttccttctgcacgcctggtgggccctactccaggcgggtgctgcgacggtggccactgcgctcctgcgtacgcgggggcagccctcgtcgccatcccctctggcgtacatgctgagcctctaccgcgacccgctgccgagggcagacatcatccgcagcctacaggcagaagatgtggcagtggatgggcagaactggacgtttgcttttgacttctccttcctgagccaacaagaggatctggcatgggctgagctccggctgcagctgtccagccctgtggacctccccactgagggctcacttgccattgagattttccaccagccaaagcccgacacagagcaggcttcagacagctgcttagagcggtttcagatggacctattcactgtcactttgtcccaggtcaccttttccttgggcagcatggttttggaggtgaccaggcctctctccaagtggctgaagcaccctggggccctggagaagcagatgtccagggtagctggagagtgctggccgcggccccccacaccgcctgccaccaatgtgctccttatgctctactccaacctctcgcaggagcagaggcagctgggtgggtccaccttgctgtgggaagccgagagctcctggcgggcccaggagggacagctgtcctgggagtggggcaagaggcaccgtcgacatcacttgccagacagaagtcaactgtgtcggaaggtcaagttccaggtggacttcaacctgatcggatggggctcctggatcatctaccccaagcagtacaacgcctatcgctgtgagggcgagtgtcctaatcctgttggggaggagtttcatccgaccaaccatgcatacatccagagtctgctgaaacgttaccagccccaccgagtcccttccacttgttgtgccccagtgaagaccaagccgctgagcatgctgtatgtggataatggcagagtgctcctagatcaccataaagacatgatcgtggaagaatgtgggtgcctctgatgacatcctggagggagactggatttgcctgcactctggaaggctgggaaactcctggaagacatgataaccatctaatccagtaaggagaaacagagaggggcaaagttgctctgcccaccagaactgaagaggaggggctgcccactctgtaaatgaagggctcagtggagtctggccaagcacagaggctgctgtcaggaagagggaggaagaagcctgtgcagggggctggctggatgttctctttactgaaaagacagtggcaaggaaaagcacaagtgcatgagttctttactggattttttaaaaacctgtgaaccccccgaaactgtatgtgaaagttgagacatatgtgcatgtattttggaggtgggatgaagtcacctatagctttcatgtattctccaaagtagtctgtgtgtgacctgtccccctccccaaagattaaggatcactgtatagattaaaaagagtccgtcaatctcattgcctcaggctgggttgggggagccccacagctttctggctggccagtggcaatctactggccttgtccagaggctcactggagtggttctctgctaatgagctgtacaacaataaagccattgtctagttctcctgggccagctggtgcctgtgaaggcagaggcaggaactcatccaagaggaccggccatgttgggttacagaagacatccctgcgtcagtctgcttcggcagacacagcctgagtttgttaaagttggtgacaatccacctcagtctctcaatgtgtgctattaatgaggcctctgagcttcctatccagcagtggtgaaggccttgccctgggtggcaagatacttgctctatggtcacagctcagccactggaagctgtgcgacctcaggtgagcaattcactgtccagtctccacttgtaaaaggaacgctggtgaatcctaatgcattcatattaaatgtctgttgtcaggctcagaagagccatgagcttt

SEQ ID NO: 47 - DNA, 3039 bp, Homo sapiens
aataaagcgtgaacccgtccgtccggctcgcactttaagacttcccgagcggcggcggggacgccagtcgagccgggagacgcttacctgccgcttccccgcgccgcccggtgcacctggccgcaagggacctcgttctcagggaagacggcgacattccgcggaggtggaaccgccgcgcgccgtccgggctcggaccttccccggaacgtgggggcgccttagcgactccttccctgttgtgcccccgttcccggcgttcagcccggccccgcaaaggtgggacggctcccggcttcagttacggaagcggcccgtgtccagcgacgagggttcgaaaatgccccgcgcgttcctggtgaagaagccgtgcgtctccacgtgcaagaggaactggagcgagctccccgacgaggagcgcggcgagatctacgtgccagtcagcctgggcttctgcccaccacagccctaccgggagccggaaccctctgtggccgaacccccttcctgcccgctggctttgaacatgagccttcgagactctagctacagcatggcccccgggccctgtgtggtggcccagctgccctctgaagacatgggccacttgacagacccccagagcagagaccatggcttcctgcgcaccaagatgaaggtgacccttggggacagtcccagtggagacctgttcacctgccgtgtctgccagaaggccttcacctaccagcgcatgctgaaccgccacatgaagtgtcacaacgacgtcaagaggcacctctgcacgtactgcgggaagggcttcaatgacaccttcgacctcaagagacacgtccgaactcacactggcgtgcggccctacaagtgcagcctgtgtgacaaggccttcacgcagcgctgctctctggagtctcacctcaagaagatccatggtgtgcagcagaagtacgcgtacaaggagcggcgggccaagctgtacgtgtgtgaggagtgcggctgcacatctgagagccaggagggccacgtcctgcacctgaaggagcaccaccctgacagcccgctgctgcgcaagacctccaagaaggtggccgtggcactacagaacactgtcacttccctgctgcagggcagcccccacctgtgagtggctcgagccctgggggtgctcctggaagccccaagagcatccaggattgcctcccagctgcctggccagcccaccctcctgcaacctctcacccgaacaccagtgatcaggactggagcccccgtgccttggtctcccccctgggcacacgtgctcactcaggcccagcaatgacctctgctcatttttgcatttttgacttatgggccgaggctgttctgagcctgggaagatgtacctatgtcaagagaagggatgaggccaaggctgccttcaattagaagcagccgcccacagagacaggcactgtgtgcctggcagcaggacttcctacccagaggaggttcgagctaggatcccactgcccccgcctctcagcacagggcaggggctgcaggtccccagtggacatcagagtcaaaagcactggcaaagggtacccctgcaaacaactgtggtgggggctggcagcagaccccccacctggcagggcttctaatgctcagggttctggagggctctgtccttccggcaaggagaggcacacatgtgtgcccagccgtgtgtgtgcgtgtgcttgtgtgtgtgcactgctgtgtgtgtgtgcacgcacaggaagcctttccacatatcacctcatttctaagaaataaactacaaggtgccaagaaggttttatttccttttattttttaaagatgacaaatgtacagatgttaatatatttttggtgccaatggcgatgtttttaagagtgggatggagctggcttttctccattcccgtgcgcttctatttatcctggacatttcaaacctcctctgtgccttggctctgggcgggggctgccccaacccacccccgttctttgtacgtgctgagacagccactagaagatcttcctccagcggcgccctggacggctgctcctgcgaacagcccatggcatcttctgctcttccctcccggctctgccctgcacatcctgttgagccaagccccagtgacccggagagctggcctgatgctgagagtgtgtcctcctggggctttagggggcaggaaggtgggacgaatgacgatgcccatccactacctgaagcactaggacactcttgcagggccaggctggaagaccggcccttttcttggttgagtcaaaagccttagcacagtggcaaaaaatgggacagaatgatgaccagcacctcagaaacttccagagggaggagaggatttgatggctaccaaattgtatctgttgccttttttctgactttttcacctgaccaggctggggtttggagtggctgtggggagacccgtcctggctggctggctggctcccttgctcccttgctgcagctgggaaaggggttctgggtgtaaagaggtgtgcgtcttgtgggccaaagggaaaaacaggcaggggtcagagccagcctgccagaggcaaatgcaaaagaggtccccagaacacagccagctgggcagccccttaaagccaaaccccacctgaagcagaaccactttggcctcccctgcccaaaatgggtagtgtctacacgtccccgggctcaggctcaggcccagccctgggctgacctgagaggaaggctccttcctggactgccctctgaaatgtgtatagattgattctaaaatctcttgtttcacttgactttagagtgtctgggacgctgctgtattctgaaagtcacatagcacacagtaatgttatctggaagctctgtttttgtttacatttctgtatccctgggttgactgccaatccgaggccgtcatgaagctctgtgttgtctgttttattttataaccttcctctcaactattaaaattagagatctaatgtttaaaaaaaaaaaaaaaaa

SEQ ID NO: 48 - DNA, 3393 bp, Homo sapiens
cctgcctgcctccctgcgcacccgcagcctcccccgctgcctccctagggctcccctccggccgccagcgcccatttttcattccctagatagagatactttgcgcgcacacacatacatacgcgcgcaaaaaggaaaaaaaaaaaaaaaagcccaccctccagcctcgctgcaaagagaaaaccggagcagccgcagctcgcagctcgcagctcgcagcccgcagcccgcagaggacgcccagagcggcgagcgggcgggcagacggaccgacggactcgcgccgcgtccacctgtcggccgggcccagccgagcgcgcagcgggcacgccgcgcgcgcggagcagccgtgcccgccgcccgggccccgcgccagggcgcacacgctcccgcccccctacccggcccgggcgggagtttgcacctctccctgcccgggtgctcgagctgccgttgcaaagccaactttggaaaaagttttttgggggagacttgggccttgaggtgcccagctccgcgctttccgattttgggggcctttccagaaaatgttgcaaaaaagctaagccggcgggcagaggaaaacgcctgtagccggcgagtgaagacgaaccatcgactgccgtgttccttttcctcttggaggttggagtcccctgggcgcccccacacggctagacgcctcggctggttcgcgacgcagccccccggccgtggatgctcactcgggctcgggatccgcccaggtagcggcctcggacccaggtcctgcgcccaggtcctcccctgccccccagcgacggagccggggccgggggcggcggcgcccgggggccatgcgggtgagccgcggctgcagaggcctgagcgcctgatcgccgcggacccgagccgagcccacccccctccccagccccccaccctggccgcgggggcggcgcgctcgatctacgcgtccggggccccgcggggccgggcccggagtcggcatgaatcgctgctgggcgctcttcctgtctctctgctgctacctgcgtctggtcagcgccgagggggaccccattcccgaggagctttatgagatgctgagtgaccactcgatccgctcctttgatgatctccaacgcctgctgcacggagaccccggagaggaagatggggccgagttggacctgaacatgacccgctcccactctggaggcgagctggagagcttggctcgtggaagaaggagcctgggttccctgaccattgctgagccggccatgatcgccgagtgcaagacgcgcaccgaggtgttcgagatctcccggcgcctcatagaccgcaccaacgccaacttcctggtgtggccgccctgtgtggaggtgcagcgctgctccggctgctgcaacaaccgcaacgtgcagtgccgccccacccaggtgcagctgcgacctgtccaggtgagaaagatcgagattgtgcggaagaagccaatctttaagaaggccacggtgacgctggaagaccacctggcatgcaagtgtgagacagtggcagctgcacggcctgtgacccgaagcccggggggttcccaggagcagcgagccaaaacgccccaaactcgggtgaccattcggacggtgcgagtccgccggccccccaagggcaagcaccggaaattcaagcacacgcatgacaagacggcactgaaggagacccttggagcctaggggcatcggcaggagagtgtgtgggcagggttatttaatatggtatttgctgtattgcccccatggggtccttggagtgataatattgtttccctcgtccgtctgtctcgatgcctgattcggacggccaatggtgcttcccccacccctccacgtgtccgtccacccttccatcagcgggtctcctcccagcggcctccggcgtcttgcccagcagctcaagaagaaaaagaaggactgaactccatcgccatcttcttcccttaactccaagaacttgggataagagtgtgagagagactgatggggtcgctctttgggggaaacgggctccttcccctgcacctggcctgggccacacctgagcgctgtggactgtcctgaggagccctgaggacctctcagcatagcctgcctgatccctgaacccctggccagctctgaggggaggcacctccaggcaggccaggctgcctcggactccatggctaagaccacagacgggcacacagactggagaaaacccctcccacggtgcccaaacaccagtcacctcgtctccctggtgcctctgtgcacagtggcttcttttcgttttcgttttgaagacgtggactcctcttggtgggtgtggccagcacaccaagtggctgggtgccctctcaggtgggttagagatggagtttgctgttgaggtggctgtagatggtgacctgggtatcccctgcctcctgccaccccttcctccccacactccactctgattcacctcttcctctggttcctttcatctctctacctccaccctgcattttcctcttgtcctggcccttcagtctgctccaccaaggggctcttgaaccccttattaaggccccagatgatcccagtcactcctctctagggcagaagactagaggccagggcagcaagggacctgctcatcatattccaacccagccacgactgccatgtaaggttgtgcagggtgtgtactgcacaaggacattgtatgcagggagcactgttcacatcatagataaagctgatttgtatatttattatgacaatttctggcagatgtaggtaaagaggaaaaggatccttttcctaattcacacaaagactccttgtggactggctgtgcccctgatgcagcctgtggcttggagtggccaaataggagggagactgtggtaggggcagggaggcaacactgctgtccacatgacctccatttcccaaagtcctctgctccagcaactgcccttccaggtgggtgtgggacacctgggagaaggtctccaagggagggtgcagccctcttgcccgcacccctccctgcttgcacacttccccatctttgatccttctgagctccacctctggtggctcctcctaggaaaccagctcgtgggctgggaatgggggagagaagggaaaagatccccaagaccccctggggtgggatctgagctcccacctcccttcccacctactgcactttcccccttcccgccttccaaaacctgcttccttcagtttgtaaagtcggtgattatatttttgggggctttccttttattttttaaatgtaaaatttatttatattccgtatttaaagttgtaaaaaaaaataaccacaaaacaaaaccaaatgaaaaaaaaaaaaaaaaaa

SEQ ID NO: 49 - DNA, 4934 bp, Homo sapiens
aaacccgatctccttggacttgaatgaggaggaggaggcggcggcggcggcggcggcggaggcgctcggctggggaaagctagcggcagaggctcagccccggcggcagcgcgcgccccgctgccagcccattttccggacgccacccgcgggcactgccgacgcccccggggctgccgaggggaggccgggggggcgcagcggagcgcggtcccgcgcactgagccccgcggcgccccgggaacttggcggcgacccgagcccggcgagccggggcgcgcctcccccgccgcgcgcctcctgcatgcggggccccagctccgggcgccggccggagccccccccggccgcccccgagccccccgcgccccgcgccgcgccgccgcgccgtccatgcaccgcttgatgggggtcaacagcaccgccgccgccgccgccgggcagcccaatgtctcctgcacgtgcaactgcaaacgctctttgttccagagcatggagatcacggagctggagtttgttcagatcatcatcatcgtggtggtgatgatggtgatggtggtggtgatcacgtgcctgctgagccactacaagctgtctgcacggtccttcatcagccggcacagccaggggcggaggagagaagatgccctgtcctcagaaggatgcctgtggccctcggagagcacagtgtcaggcaacggaatcccagagccgcaggtctacgccccgcctcggcccaccgaccgcctggccgtgccgcccttcgcccagcgggagcgcttccaccgcttccagcccacctatccgtacctgcagcacgagatcgacctgccacccaccatctcgctgtcagacggggaggagcccccaccctaccagggcccctgcaccctccagcttcgggaccccgagcagcagctggaactgaaccgggagtcggtgcgcgcacccccaaacagaaccatcttcgacagtgacctgatggatagtgccaggctgggcggcccctgcccccccagcagtaactcgggcatcagcgccacgtgctacggcagcggcgggcgcatggaggggccgccgcccacctacagcgaggtcatcggccactacccggggtcctccttccagcaccagcagagcagtgggccgccctccttgctggaggggacccggctccaccacacacacatcgcgcccctagagagcgcagccatctggagcaaagagaaggataaacagaaaggacaccctctctagggtccccaggggggccgggctggggctgcgtaggtgaaaaggcagaacactccgcgcttcttagaagaggagtgagaggaaggcggggggcgcagcaacgcatcgtgtggccctcccctcccacctccctgtgtataaatatttacatgtgatgtctggtctgaatgcacaagctaagagagcttgcaaaaaaaaaaagaaaaaagaaaaaaaaaaaccacgtttctttgttgagctgtgtcttgaaggcaaaagaaaaaaaatttctacagtagtctttcttgtttctagttgagctgcgtgcgtgaatgcttattttcttttgtttatgataatttcacttaactttaaagacatatttgcacaaaacctttgtttaaagatctgcaatattatatatataaatatatataagataagagaaactgtatgtgcgagggcaggagtatttttgtattagaagaggcctattaaaaaaaaaagttgttttctgaactagaagaggaaaaaaatggcaatttttgagtgccaagtcagaaagtgtgtattaccttgtaaagaaaaaaattacaaagcaggggtttagagttatttatataaatgttgagattttgcactattttttaatataaatatgtcagtgcttgcttgatggaaacttctcttgtgtctgttgagactttaagggagaaatgtcggaatttcagagtcgcctgacggcagagggtgagcccccgtggagtctgcagagaggccttggccaggagcggcgggctttcccgaggggccactgtccctgcagagtggatgcttctgcctagtgacaggttatcaccacgttatatattccctaccgaaggagacaccttttcccccctgacccagaacagcctttaaatcacaagcaaaataggaaagttaaccacggaggcaccgagttccaggtagtggttttgcctttcccaaaaatgaaaataaactgttaccgaaggaattagtttttcctcttcttttttccaactgtgaaggtccccgtggggtggagcatggtgcccctcacaagccgcagcggctggtgcccgggctaccagggacatgccagagggctcgatgacttgtctctgcagggcgctttggtggttgttcagctggctaaaggttcaccggtgaaggcaggtgcggtaactgccgcactggaccctaggaagccccaggtattcgcaatctgacctcctcctgtctgtttcccttcacggatcaattctcacttaagaggccaataaacaacccaacatgaaaaggtgacaagcctgggtttctcccaggataggtgaaagggttaaaatgagtaaagcagttgagcaaacaccaacccgagcttcgggcgcagaattcttcaccttctcttcccctttccatctcctttccccgcggaaacaacgcttcccttctggtgtgtctgttgatctgtgttttcatttacatctctcttagactccgctcttgttctccaggttttcaccagatagatttggggttggcgggacctgctggtgacgtgcaggtgaaggacaggaaggggcatgtgagcgtaaatagaggtgaccagaggagagcatgaggggtggggctttgggacccaccggggccagtggctggagcttgacgtctttcctccccatgggggtgggagggcccccagctggaagagcagactcccagctgctaccccctcccttcccatgggagtggctttccattttgggcagaatgctgactagtagactaacataaaagatataaaaggcaataactattgtttgtgagcaacttttttataacttccaaaacaaaaacctgagcacagttttgaagttctagccactcgagctcatgcatgtgaaacgtgtgctttacgaaggtggcagctgacagacgtgggctctgcatgccgccagcctagtagaaagttctcgttcattggcaacagcagaacctgcctctccgtgaagtcgtcagcctaaaatttgtttctctcttgaagaggattctttgaaaaggtcctgcagagaaatcagtacaggttatcccgaaaggtacaaggacgcacttgtaaagatgattaaaacgtatctttcctttatgtgacgcgtctctagtgccttactgaagaagcagtgacactcccgtcgctcggtgaggacgttcccggacagtgcctcactcacctgggactggtatcccctcccagggtccaccaagggctcctgcttttcagacaccccatcatcctcgcgcgtcctcaccctgtctctaccagggaggtgcctagcttggtgaggttactcctgctcctccaacctttttttgccaaggtttgtacacgactcccatctaggctgaaaacctagaagtggaccttgtgtgtgtgcatggtgtcagcccaaagccaggctgagacagtcctcatatcctcttgagccaaactgtttgggtctcgttgcttcatggtatggtctggatttgtgggaatggctttgcgtgagaaaggggaggagagtggttgctgccctcagccggcttgaggacagagcctgtccctctcatgacaactcagtgttgaagcccagtgtcctcagcttcatgtccagtggatggcagaagttcatggggtagtggcctctcaaaggctgggcgcatcccaagacagccagcaggttgtctctggaaacgaccagagttaagctctcggcttctctgctgagggtgcaccctttcctctagatggtagttgtcacgttatctttgaaaactcttggactgctcctgaggaggccctcttttccagtaggaagttagatgggggttctcagaagtggctgattggaaggggacaagcttcgtttcaggggtctgccgttccatcctggttcagagaaggccgagcgtggctttctctagccttgtcactgtctccctgcctgtcaatcaccacctttcctccagaggaggaaaattatctcccctgcaaagcccggttctacacagatttcacaaattgtgctaagaaccgtccgtgttctcagaaagcccagtgtttttgcaaagaatgaaaagggaccccatatgtagcaaaaatcagggctgggggagagccgggttcattccctgtcctcattggtcgtccctatgaattgtacgtttcagagaaattttttttcctatgtgcaacacgaagcttccagaaccataaaatatcccgtcgataaggaaagaaaatgtcgttgttgttgtttttctggaaactgcttgaaatcttgctgtactatagagctcagaaggacacagcccgtcctcccctgcctgcctgattccatggctgttgtgctgattccaatgctttcacgttggttcctggcgtgggaactgctctcctttgcagccccatttcccaagctctgttcaagttaaacttatgtaagctttccgtggcatgcggggcgcgcacccacgtccccgctgcgtaagactctgtatttggatgccaatccacaggcctgaagaaactgcttgttgtgtatcagtaatcattagtggcaatgatgacattctgaaaagctgcaatacttatacaataaattttacaattctttggaatgagaaaaaaaaaaaaaaaa

SEQ ID NO: 50 - DNA, 1818 bp, Homo sapiens
ggcgcccgcgcccgcccccgcgccgggcccggctcggcccgacccggctccgccgcgggcaggcggggcccagcgcactcggagcccgagcccgagccgcagccgccgcctggggcgcttgggtcggcctcgaggacaccggagaggggcgccacgccgccgtggccgcagaaatgaccatggttgacacagagatgccattctggcccaccaactttgggatcagctccgtggatctctccgtaatggaagaccactcccactcctttgatatcaagcccttcactactgttgacttctccagcatttctactccacattacgaagacattccattcacaagaacagatccagtggttgcagattacaagtatgacctgaaacttcaagagtaccaaagtgcaatcaaagtggagcctgcatctccaccttattattctgagaagactcagctctacaataagcctcatgaagagccttccaactccctcatggcaattgaatgtcgtgtctgtggagataaagcttctggatttcactatggagttcatgcttgtgaaggatgcaagggtttcttccggagaacaatcagattgaagcttatctatgacagatgtgatcttaactgtcggatccacaaaaaaagtagaaataaatgtcagtactgtcggtttcagaaatgccttgcagtggggatgtctcataatgccatcaggtttgggcggatgccacaggccgagaaggagaagctgttggcggagatctccagtgatatcgaccagctgaatccagagtccgctgacctccgggccctggcaaaacatttgtatgactcatacataaagtccttcccgctgaccaaagcaaaggcgagggcgatcttgacaggaaagacaacagacaaatcaccattcgttatctatgacatgaattccttaatgatgggagaagataaaatcaagttcaaacacatcacccccctgcaggagcagagcaaagaggtggccatccgcatctttcagggctgccagtttcgctccgtggaggctgtgcaggagatcacagagtatgccaaaagcattcctggttttgtaaatcttgacttgaacgaccaagtaactctcctcaaatatggagtccacgagatcatttacacaatgctggcctccttgatgaataaagatggggttctcatatccgagggccaaggcttcatgacaagggagtttctaaagagcctgcgaaagccttttggtgactttatggagcccaagtttgagtttgctgtgaagttcaatgcactggaattagatgacagcgacttggcaatatttattgctgtcattattctcagtggagaccgcccaggtttgctgaatgtgaagcccattgaagacattcaagacaacctgctacaagccctggagctccagctgaagctgaaccaccctgagtcctcacagctgtttgccaagctgctccagaaaatgacagacctcagacagattgtcacggaacacgtgcagctactgcaggtgatcaagaagacggagacagacatgagtcttcacccgctcctgcaggagatctacaaggacttgtactagcagagagtcctgagccactgccaacatttcccttcttccagttgcactattctgagggaaaatctgacacctaagaaatttactgtgaaaaagcattttaaaaagaaaaggttttagaatatgatctattttatgcatattgtttataaagacacatttacaatttacttttaatattaaaaattaccatattatgaaattgctgatagta

SEQ ID NO: 51 - DNA, 4507 bp, Homo sapiens
gaccaattgtcatacgacttgcagtgagcgtcaggagcacgtccaggaactcctcagcagcgcctccttcagctccacagccagacgccctcagacagcaaagcctacccccgcgccgcgccctgcccgccgctgcgatgctcgcccgcgccctgctgctgtgcgcggtcctggcgctcagccatacagcaaatccttgctgttcccacccatgtcaaaaccgaggtgtatgtatgagtgtgggatttgaccagtataagtgcgattgtacccggacaggattctatggagaaaactgctcaacaccggaatttttgacaagaataaaattatttctgaaacccactccaaacacagtgcactacatacttacccacttcaagggattttggaacgttgtgaataacattcccttccttcgaaatgcaattatgagttatgtgttgacatccagatcacatttgattgacagtccaccaacttacaatgctgactatggctacaaaagctgggaagccttctctaacctctcctattatactagagcccttcctcctgtgcctgatgattgcccgactcccttgggtgtcaaaggtaaaaagcagcttcctgattcaaatgagattgtggaaaaattgcttctaagaagaaagttcatccctgatccccagggctcaaacatgatgtttgcattctttgcccagcacttcacgcatcagtttttcaagacagatcataagcgagggccagctttcaccaacgggctgggccatggggtggacttaaatcatatttacggtgaaactctggctagacagcgtaaactgcgccttttcaaggatggaaaaatgaaatatcagataattgatggagagatgtatcctcccacagtcaaagatactcaggcagagatgatctaccctcctcaagtccctgagcatctacggtttgctgtggggcaggaggtctttggtctggtgcctggtctgatgatgtatgccacaatctggctgcgggaacacaacagagtatgcgatgtgcttaaacaggagcatcctgaatggggtgatgagcagttgttccagacaagcaggctaatactgataggagagactattaagattgtgattgaagattatgtgcaacacttgagtggctatcacttcaaactgaaatttgacccagaactacttttcaacaaacaattccagtaccaaaatcgtattgctgctgaatttaacaccctctatcactggcatccccttctgcctgacacctttcaaattcatgaccagaaatacaactatcaacagtttatctacaacaactctatattgctggaacatggaattacccagtttgttgaatcattcaccaggcaaattgctggcagggttgctggtggtaggaatgttccacccgcagtacagaaagtatcacaggcttccattgaccagagcaggcagatgaaataccagtcttttaatgagtaccgcaaacgctttatgctgaagccctatgaatcatttgaagaacttacaggagaaaaggaaatgtctgcagagttggaagcactctatggtgacatcgatgctgtggagctgtatcctgcccttctggtagaaaagcctcggccagatgccatctttggtgaaaccatggtagaagttggagcaccattctccttgaaaggacttatgggtaatgttatatgttctcctgcctactggaagccaagcacttttggtggagaagtgggttttcaaatcatcaacactgcctcaattcagtctctcatctgcaataacgtgaagggctgtccctttacttcattcagtgttccagatccagagctcattaaaacagtcaccatcaatgcaagttcttcccgctccggactagatgatatcaatcccacagtactactaaaagaacgttcgactgaactgtagaagtctaatgatcatatttatttatttatatgaaccatgtctattaatttaattatttaataatatttatattaaactccttatgttacttaacatcttctgtaacagaagtcagtactcctgttgcggagaaaggagtcatacttgtgaagacttttatgtcactactctaaagattttgctgttgctgttaagtttggaaaacagtttttattctgttttataaaccagagagaaatgagttttgacgtctttttacttgaatttcaacttatattataagaacgaaagtaaagatgtttgaatacttaaacactgtcacaagatggcaaaatgctgaaagtttttacactgtcgatgtttccaatgcatcttccatgatgcattagaagtaactaatgtttgaaattttaaagtacttttggttatttttctgtcatcaaacaaaaacaggtatcagtgcattattaaatgaatatttaaattagacattaccagtaatttcatgtctactttttaaaatcagcaatgaaacaataatttgaaatttctaaattcatagggtagaatcacctgtaaaagcttgtttgatttcttaaagttattaaacttgtacatataccaaaaagaagctgtcttggatttaaatctgtaaaatcagtagaaattttactacaattgcttgttaaaatattttataagtgatgttcctttttcaccaagagtataaacctttttagtgtgactgttaaaacttccttttaaatcaaaatgccaaatttattaaggtggtggagccactgcagtgttatcttaaaataagaatattttgttgagatattccagaatttgtttatatggctggtaacatgtaaaatctatatcagcaaaagggtctacctttaaaataagcaataacaaagaagaaaaccaaattattgttcaaatttaggtttaaacttttgaagcaaacttttttttatccttgtgcactgcaggcctggtactcagattttgctatgaggttaatgaagtaccaagctgtgcttgaataatgatatgttttctcagattttctgttgtacagtttaatttagcagtccatatcacattgcaaaagtagcaatgacctcataaaatacctcttcaaaatgcttaaattcatttcacacattaattttatctcagtcttgaagccaattcagtaggtgcattggaatcaagcctggctacctgcatgctgttccttttcttttcttcttttagccattttgctaagagacacagtcttctcatcacttcgtttctcctattttgttttactagttttaagatcagagttcactttctttggactctgcctatattttcttacctgaacttttgcaagttttcaggtaaacctcagctcaggactgctatttagctcctcttaagaagattaaaagagaaaaaaaaaggcccttttaaaaatagtatacacttattttaagtgaaaagcagagaattttatttatagctaattttagctatctgtaaccaagatggatgcaaagaggctagtgcctcagagagaactgtacggggtttgtgactggaaaaagttacgttcccattctaattaatgccctttcttatttaaaaacaaaaccaaatgatatctaagtagttctcagcaataataataatgacgataatacttcttttccacatctcattgtcactgacatttaatggtactgtatattacttaatttattgaagattattatttatgtcttattaggacactatggttataaactgtgtttaagcctacaatcattgatttttttttgttatgtcacaatcagtatattttctttggggttacctctctgaatattatgtaaacaatccaaagaaatgattgtattaagatttgtgaataaatttttagaaatctgattggcatattgagatatttaaggttgaatgtttgtccttaggataggcctatgtgctagcccacaaagaatattgtctcattagcctgaatgtgccataagactgaccttttaaaatgttttgagggatctgtggatgcttcgttaatttgttcagccacaatttattgagaaaatattctgtgtcaagcactgtgggttttaatatttttaaatcaaacgctgattacagataatagtatttatataaataattgaaaaaaattttcttttgggaagagggagaaaatgaaataaatatcattaaagataactcaggagaatcttctttacaattttacgtttagaatgtttaaggttaagaaagaaatagtcaatatgcttgtataaaacactgttcactgttttttttaaaaaaaaaacttgatttgttattaacattgatctgctgacaaaacctgggaatttgggttgtgtatgcgaatgtttcagtgcctcagacaaatgtgtatttaacttatgtaaaagataagtctggaaataaatgtctgtttatttttgtactatttaaaaattgacagatcttttctgaagaaaaaaaaaaaaaaa

SEQ ID NO: 52 - DNA, 1331 bp, Homo sapiens
cctgcatctttttggaaggattctttttataaatcagaaagtgttcgaggttcaaaggtttgcctcggagcgtgtgaacattcctccgctcggttttcaactcgcctccaacctgcgccgcccggccagcatgtctccccgcccgtgaagcggggctgccgcctccctgccgctccggctgccactaacgacccgccctcgccgccacctggccctcctgatcgacgacacacgcacttgaaacttgttctcagggtgtgtggaatcaactttccggaagcaaccagcccaccagaggaggtcccgagcgcgagcggagacgatgcagcggagactggttcagcagtggagcgtcgcggtgttcctgctgagctacgcggtgccctcctgcgggcgctcggtggagggtctcagccgccgcctcaaaagagctgtgtctgaacatcagctcctccatgacaaggggaagtccatccaagatttacggcgacgattcttccttcaccatctgatcgcagaaatccacacagctgaaatcagagctacctcggaggtgtcccctaactccaagccctctcccaacacaaagaaccaccccgtccgatttgggtctgatgatgagggcagatacctaactcaggaaactaacaaggtggagacgtacaaagagcagccgctcaagacacctgggaagaaaaagaaaggcaagcccgggaaacgcaaggagcaggaaaagaaaaaacggcgaactcgctctgcctggttagactctggagtgactgggagtgggctagaaggggaccacctgtctgacacctccacaacgtcgctggagctcgattcacggaggcattgaaattttcagcagagaccttccaaggacatattgcaggattctgtaatagtgaacatatggaaagtattagaaatatttattgtctgtaaatactgtaaatgcattggaataaaactgtctcccccattgctctatgaaactgcacattggtcattgtgaatattttttttttgccaaggctaatccaattattattatcacatttaccataatttattttgtccattgatgtatttattttgtaaatgtatcttggtgctgctgaatttctatattttttgtaacataatgcactttagatatacatatcaagtatgttgataaatgacacaatgaagtgtctctattttgtggttgattttaatgaatgcctaaatataattatccaaattgattttcctttgtgcatgtaaaaataacagtattttaaatttgtaaagaatgtctaataaaatataatctaattacatcatga

SEQ ID NO: 53 - DNA, 3207 bp, Homo sapiens
ggcccacagaggagcacagctgtgtttggctgcagggccaagagcgctgtcaagaagacccacacgcccccctccagcagctgaattcctgcagctcagcagccgccgccagagcaggacgaaccgccaatcgcaaggcacctctgagaacttcaggatgcagatgtctccagccctcacctgcctagtcctgggcctggcccttgtctttggtgaagggtctgctgtgcaccatcccccatcctacgtggcccacctggcctcagacttcggggtgagggtgtttcagcaggtggcgcaggcctccaaggaccgcaacgtggttttctcaccctatggggtggcctcggtgttggccatgctccagctgacaacaggaggagaaacccagcagcagattcaagcagctatgggattcaagattgatgacaagggcatggcccccgccctccggcatctgtacaaggagctcatggggccatggaacaaggatgagatcagcaccacagacgcgatcttcgtccagcgggatctgaagctggtccagggcttcatgccccacttcttcaggctgttccggagcacggtcaagcaagtggacttttcagaggtggagagagccagattcatcatcaatgactgggtgaagacacacacaaaaggtatgatcagcaacttgcttgggaaaggagccgtggaccagctgacacggctggtgctggtgaatgccctctacttcaacggccagtggaagactcccttccccgactccagcacccaccgccgcctcttccacaaatcagacggcagcactgtctctgtgcccatgatggctcagaccaacaagttcaactatactgagttcaccacgcccgatggccattactacgacatcctggaactgccctaccacggggacaccctcagcatgttcattgctgccccttatgaaaaagaggtgcctctctctgccctcaccaacattctgagtgcccagctcatcagccactggaaaggcaacatgaccaggctgccccgcctcctggttctgcccaagttctccctggagactgaagtcgacctcaggaagcccctagagaacctgggaatgaccgacatgttcagacagtttcaggctgacttcacgagtctttcagaccaagagcctctccacgtcgcgcaggcgctgcagaaagtgaagatcgaggtgaacgagagtggcacggtggcctcctcatccacagctgtcatagtctcagcccgcatggcccccgaggagatcatcatggacagacccttcctctttgtggtccggcacaaccccacaggaacagtccttttcatgggccaagtgatggaaccctgaccctggggaaagacgccttcatctgggacaaaactggagatgcatcgggaaagaagaaactccgaagaaaagaattttagtgttaatgactctttctgaaggaagagaagacatttgccttttgttaaaagatggtaaaccagatctgtctccaagaccttggcctctccttggaggacctttaggtcaaactccctagtctccacctgagaccctgggagagaagtttgaagcacaactcccttaaggtctccaaaccagacggtgacgcctgcgggaccatctggggcacctgcttccacccgtctctctgcccactcgggtctgcagacctggttcccactgaggccctttgcaggatggaactacggggcttacaggagcttttgtgtgcctggtagaaactatttctgttccagtcacattgccatcactcttgtactgcctgccaccgcggaggaggctggtgacaggccaaaggccagtggaagaaacaccctttcatctcagagtccactgtggcactggccacccctccccagtacaggggtgctgcaggtggcagagtgaatgtcccccatcatgtggcccaactctcctggcctggccatctccctccccagaaacagtgtgcatgggttattttggagtgtaggtgacttgtttactcattgaagcagatttctgcttccttttatttttataggaatagaggaagaaatgtcagatgcgtgcccagctcttcaccccccaatctcttggtggggaggggtgtacctaaatatttatcatatccttgcccttgagtgcttgttagagagaaagagaactactaaggaaaataatattatttaaactcgctcctagtgtttctttgtggtctgtgtcaccgtatctcaggaagtccagccacttgactggcacacacccctccggacatccagcgtgacggagcccacactgccaccttgtggccgcctgagaccctcgcgccccccgcgcccctctttttccccttgatggaaattgaccatacaatttcatcctccttcaggggatcaaaaggacggagtggggggacagagactcagatgaggacagagtggtttccaatgtgttcaatagatttaggagcagaaatgcaaggggctgcatgacctaccaggacagaactttccccaattacagggtgactcacagccgcattggtgactcacttcaatgtgtcatttccggctgctgtgtgtgagcagtggacacgtgaggggggggtgggtgagagagacaggcagctcggattcaactaccttagataatatttctgaaaacctaccagccagagggtagggcacaaagatggatgtaatgcactttgggaggccaaggcgggaggattgcttgagcccaggagttcaagaccagcctgggcaacataccaagacccccgtctctttaaaaatatatatattttaaatatacttaaatatatatttctaatatctttaaatatatatatatattttaaagaccaatttatgggagaattgcacacagatgtgaaatgaatgtaatctaatagaagcctaatcagcccaccatgttctccactgaaaaatcctctttctttggggtttttctttctttcttttttgattttgcactggacggtgacgtcagccatgtacaggatccacaggggtggtgtcaaatgctattgaaattgtgttgaattgtatgctttttcacttttgataaataaacatgtaaaaatgtttcaaaaaaataataaaataaataaatacgaagaatatgtcaggacagtcaaaaaaaaaaaaaaaaaa

SEQ ID NO: 54 - DNA, 2414 bp, Homo sapiens
ttttttataaggccgagcgcgcggcctggcgcagcatacgccgagccggtctttgagcgctaacgtctttctgtctccccgcggtggtgatgacggtgaaaactgaggctgctaagggcaccctcacttactccaggatgaggggcatggtggcaattctcatcgctttcatgaagcagaggaggatgggtctgaacgactttattcagaagattgccaataactcctatgcatgcaaacaccctgaagttcagtccatcttgaagatctcccaacctcaggagcctgagcttatgaatgccaacccttctcctccaccaagtccttctcagcaaatcaaccttggcccgtcgtccaatcctcatgctaaaccatctgactttcacttcttgaaagtgatcggaaagggcagttttggaaaggttcttctagcaagacacaaggcagaagaagtgttctatgcagtcaaagttttacagaagaaagcaatcctgaaaaagaaagaggagaagcatattatgtcggagcggaatgttctgttgaagaatgtgaagcaccctttcctggtgggccttcacttctctttccagactgctgacaaattgtactttgtcctagactacattaatggtggagagttgttctaccatctccagagggaacgctgcttcctggaaccacgggctcgtttctatgctgctgaaatagccagtgccttgggctacctgcattcactgaacatcgtttatagagacttaaaaccagagaatattttgctagattcacagggacacattgtccttactgacttcggactctgcaaggagaacattgaacacaacagcacaacatccaccttctgtggcacgccggagtatctcgcacctgaggtgcttcataagcagccttatgacaggactgtggactggtggtgcctgggagctgtcttgtatgagatgctgtatggcctgccgcctttttatagccgaaacacagctgaaatgtacgacaacattctgaacaagcctctccagctgaaaccaaatattacaaattccgcaagacacctcctggagggcctcctgcagaaggacaggacaaagcggctcggggccaaggatgacttcatggagattaagagtcatgtcttcttctccttaattaactgggatgatctcattaataagaagattactcccccttttaacccaaatgtgagtgggcccaacgacctacggcactttgaccccgagtttaccgaagagcctgtccccaactccattggcaagtcccctgacagcgtcctcgtcacagccagcgtcaaggaagctgccgaggctttcctaggcttttcctatgcgcctcccacggactctttcctctgaaccctgttagggcttggttttaaaggattttatgtgtgtttccgaatgttttagttagccttttggtggagccgccagctgacaggacatcttacaagagaatttgcacatctctggaagcttagcaatcttattgcacactgttcgctggaagctttttgaagagcacattctcctcagtgagctcatgaggttttcatttttattcttccttccaacgtggtgctatctctgaaacgagcgttagagtgccgccttagacggaggcaggagtttcgttagaaagcggacgctgttctaaaaaaggtctcctgcagatctgtctgggctgtgatgacgaatattatgaaatgtgccttttctgaagagattgtgttagctccaaagcttttcctatcgcagtgtttcagttctttattttcccttgtggatatgctgtgtgaaccgtcgtgtgagtgtggtatgcctgatcacagatggattttgttataagcatcaatgtgacacttgcaggacactacaacgtgggacattgtttgtttcttccatatttggaagataaatttatgtgtagacttttttgtaagatacggttaataactaaaatttattgaaatggtcttgcaatgactcgtattcagatgcttaaagaaagcattgctgctacaaatatttctatttttagaaagggtttttatggaccaatgccccagttgtcagtcagagccgttggtgtttttcattgtttaaaatgtcacctgtaaaatgggcattatttatgtttttttttttgcattcctgataattgtatgtattgtataaagaacgtctgtacattgggttataacactagtatatttaaacttacaggcttatttgtaatgtaaaccaccattttaatgtactgtaattaacatggttataatacgtacaatccttccctcatcccatcacacaactttttttgtgtgtgataaactgattttggtttgcaataaaaccttgaaaaatatttacatataaaaaaaa

SEQ ID NO: 55 - DNA, 7202 bp, Homo sapiens
gatgtgtgtggggttcggagccgcgccggcacagccgaagggagcgggcgagcggcgacggcggcggcggcgggcacagattaattaaaagaagaatgaactataatccttgaagataactgggcaattttttaagtcggaggctgttcttactggtgtgaggatttacacacgtcttcagtttttcagcacagaccagcagaccatcatttttagaggaaatactccctctgccctcctttttggtttccttggtggtaaagattaaatttggttgcatcattttgacttgtgtttgagtctagattttatggcacaaggaatggcataaacttttcatgtgttttggttaaaacaaaccagaccattgcattgaccctggacatctttaattgagaaattggtaactttattttaatatgtatatctgaagaattcaagaaaacaaaggcatcctcagaggtgtgcctcttttctttattattagaggcaaaacgaacaattttataggatttgtagtgaaattataccagattataaggagaaccaaaactaagtcgcaaaatttattaatttaaggggctctcgctttgaaagtttgagagtaagttacgataggcatttgtatccattcattactttcctcttttcaaataagcaactaaatagaaatgctaatctcagacttaattatttaacagaagagtgtaccatggaaaacctccagacaaatttctccttggttcagggctcaactaaaaaactgaatgggatgggagatgatggcagccccccagcgaaaaaaatgataacggacattcatgcaaatggaaaaacgataaacaaggtgccaacagttaagaaggaacacttggatgactatggagaagcaccagtggaaactgatggagagcatgttaagcgaacctgtacttctgttcctgaaactttgcatttaaatcccagtttgaaacacacattggcacaattccatttaagtagtcagagctcgctgggtggaccagcagcattttctgctcggcattcccaagaaagcatgtcgcctactgtatttctgcctcttccatcacctcaggttcttcctggcccattgctcatcccttcagatagctccacagaactcactcagactgtgttggaaggggaatctatttcttgttttcaagttggaggagaaaagagactctgtttgccccaagtcttaaattctgttctccgagaatttacactccagcaaataaatacagtgtgtgatgaactgtacatatattgttcaaggtgtacttcagaccagcttcatatcttaaaggtactgggcatacttccattcaatgccccatcctgtgggctgattacattaactgatgcacaaagattatgtaatgctttattgcggccacgaacttttcctcaaaatggtagcgtacttcctgctaaaagctcattggcccagttaaaggaaactggcagtgcctttgaagtggagcatgaatgcctaggcaaatgtcagggtttatttgcaccccagttttatgttcagcctgatgctccgtgtattcaatgtctggagtgttgtggaatgtttgcaccccagacgtttgtgatgcattctcacagatcacctgacaaaagaacttgccactggggctttgaatcagctaaatggcattgctatcttcatgtgaaccaaaaatacttaggaacacctgaagaaaagaaactgaagataattttagaagaaatgaaggagaagtttagcatgagaagtggaaagagaaatcaatccaagacagatgcaccatcaggaatggaattacagtcatggtatcctgttataaagcaggaaggtgaccatgtttctcagacacattcatttttacaccccagctactacttatacatgtgtgataaagtggttgccccaaatgtgtcacttacttctgctgtatcccagtctaaagagctcacaaagacagaggcaagtaagtccatatcaagacagtcagagaaggctcacagtagtggtaaacttcaaaaaacagtgtcttatccagatgtctcacttgaggaacaggagaaaatggatttaaaaacaagtagagaattatgtagccgtttagatgcatcaatctcaaataattctacaagtaaaaggaaatctgagtctgccacttgcaacttagtcagagacataaacaaagtgggaattggccttgttgctgccgcttcatctccgcttcttgtgaaagatgtcatttgtgaggatgataagggaaaaatcatggaagaagtaatgagaacttatttaaaacaacaggaaaaactaaacttgattttgcaaaagaagcaacaacttcagatggaagtaaaaatgttgagtagttcaaaatctatgaaggaactcactgaagaacagcagaatttacagaaagagcttgaatctttgcagaatgaacatgctcaaagaatggaagaattttatgttgaacagaaagacttagagaaaaaattggagcagataatgaagcaaaaatgtacctgtgactcaaatttagaaaaagacaaagaggctgaatatgcaggacagttggcagaactgaggcagagattggaccatgctgaggccgataggcaagaactccaagatgaactcagacaggaacgggaagcaagacagaagttagagatgatgataaaagagctaaagctgcaaattctgaaatcatcaaagactgctaaagaatagaaactgttaaagagattcatctgtgtattactgacaaggttttttttgtttgttgcttgctttggtaattgaattctgaagaatttatctgcatgacgataactaggcattctatccatttgtagatcagagaaagtgaagagattatatattagtacttaaatttttacattttccaaatgaatgaaaatgtatgtttctttgtacttttttaaaaaaatcagcttagtaacaatactatatggtttcaactagtaggtaatctgcttatatttctaatgcaaacttaacaattgtgtactttttaaaagctgcaatatgtgttggaaaatagctgtggtcaattttgttatccatatttcagactcaattttagatacaatggtggctttatattttaagtatatagagctactcaaggagttgaatctccccttttctcattaacacaatttttctaagttgatatggtgtactcattaacatacaccaaatttacttttactttgttcagattgtggaatgaatttccaccagttctcttctttttaatgtgtaccctaggaggaattttactgaggttatagcataccccatgagcacagtggggaagaagaatgtgttgttatgtgctgctgctaaacagaagcagcagttgtaatttgtttttcagtttaaatgtggttatagttagatttttttttaagcagcaacttttcaaaaataaaatgtgataatttctgaacttttgtttgtgttgttaatagtggtgtgaaaatattaacgttcttgagaaaaactgataccactgttgtgtatcagtttctatacaatccataatcctcctgtacagtttttacatgtagttatgagtcttactaaaatttatataatggacttgttttcctttaagttgtaaaatgttaaacaccttgaaggttattttggacttctgtatgtttaaatgttgtcttaccaaaatttgcacgaatggaccattttcatttactacttaatatcaaaatcaggaatttacagtcaactgatagtacatgataggtgcatataggacagtttagttacctgctactaaaagatttttagataagttttagaagataaaggaattccatagtttcaggagggacaacatcttctgcactttttttttgcacagaaaagtctgtcattctctaatggcaaatttcatatttgttaattcttggctcaaaatatattaggtaaaattcttagatctgtttttaaagggagtttcctgaaactatcattaattgacattattaccccatggattttatgggataataaatgtttttcatgttctcttataagatactatgtatgaaattacttcagagagctatatttattttaaaataaattagctagggttaaggttatattctatttccagcatagaaggtagataatctaatggtgtagaaagaatcactaggttgtcatttaaccagttattttcatattttgcttaatagtacatatccaaaaagaattttgtacttccccaaatgtaatttatttactaaattgagtataacctaaatgtgtgttttctattttccatttaaattttgctatattaagactaatttaattcgttgagtcttggaatcttctcaaggaggaacaaatattaaaatgacatgtagaaacaaatttttttttttttttttttttttttttttttgagacagagtctcgctgtctcccaggctggagttcagtggtgcaatctcggctcactgcaagctctgcctcctgggttcaagccattctcctgcctcagcctcccgagtagctgggactacaggcacccaccaccactcccggctaatttttagaaacaaatatttaaaatgacatattctcccaatacaatctatttagatctggagaaggaaaaatcagatatttatgatatagttttattttaattttgaattatttgtgtcacagctcagctttttggaagacaaactcaaacacctataatttcatttatatttctaattcacttggaacctttctgctttatgttacctagaaaatgataatttgtttaacccaaaacttctaaaataaattgcttaatccttgaaatatgttattggaaaattttaagcagtgcttaaacaccattaaattattatgaacttgtaattcagaattgagtaaagaaatattttttctagtccttcatatattgaaaacttgccacatgacattgtatcgtcttcattttccagaagatgcgttggtgtgccataggtttctaacttccttgaaaatagttttttaagtcaattgtaaatatacgtattattgttaaaagtaactttaaactgcaacacatagcttcaaaacaatatagagattttgtaataccttataagtggagttggctaaaataccttatccatataaaacttattctattctttgcatgcttattttgtgtgttggttgctagcttaaagtttgatttgttgttactctttgtgtgccaaattcactaggcaagcggatttttcctcagacttcaaaaaataattcttttaagaaaaaatgtaaaaatgtttattctaaaaagctgcattaaagggacaacctataaaaagttttgctagctcatctttagaaggaagaaagaatattagcttgggtgatgtttaatttgggtggcgatagtttctgtaggctaaactttatgagaaaagtgtacctactctataaaggtaataaatgtaaaacctcttgctgttattgaggaagctcttcaactaccctaaatttcacaaatgtaacttataacactatgaaaagatttgaccaacaatttacgtttgctgtgtgctttagtttttgtttaagcatattcttttgcttgaatttctgtgttcatgagagttagggtgttttatgcttcttgaactaattttataacatatttaatatattaccagttaagatataaaatcatttgtacatagcgaattgtaaagcagctattaaagtaggtgaaataaagtatatatttgccggttatccatatcttttagaagtcctgacagaacaaccagtttatttgcacataggtagcttctgtttgaaggaaggtaaagttataaggaaactcaaatactataagatgtgtcaaggtatttctccagaattaattgcaaagctagtgctgaaggattttaatcagcttctaaaattttcttctcaataaggcatatgttttgattacttagggaagattcctcatttttatttgccctttatgcatttaatccacatgataggacattaaaaattaatataaagaaaaatcgtgctcatactgtacatctgtttctgtgcttggaactacttgttaatagtttttatcgaagctgtcagcaataagggacataaaactgctgtattatacattgtggaattgaataaacagcctaattttttttttctagtatagggtacttaagcatttccacttttggaagaaaagtgtattagtattttatattgcatttcatttaaaaggacagttttttttttttttttgtaaatccattcattgaaatggtttctaaactgtataatgtaatttggagcctatttagtaatagaattaaatgtcctatgtagtgctacaatttttgaattagaaagtgatcaaatgtaagaaaaaaatttaaaaattcagcccagaaaacaaaatagtgtattaaattagtttaatgtaaaaggaatttataagatttttttcctcaatatagatacctcacttgaaaagaaagcacagcatacttaaagtagttctagtaaacatgtcctagaaaacagttgctaaatgtaggacatcttttgaggaattagtttatgagaaataaaattttacttgtttttactatcctgttagaagtatttgtttatcctgataattttaagccaacatagtagtcttaaattacttttgaatttctaatctgtgaaggcagtaaatgaaatatctgttctgcaactgttgaaacaaataattggctacattgaccataattaaagttaaaattttgccaatgatgtacagttttatggttaaagttgctgtggttggttgcattacatgacacagaaaactgtcctctacctcacgtgaaataaatattttatatggttttactaaaaataagactcatgtatctggtcacctagtttacaaattttgaattatatttattgaaacatgacatactgtgctctgagcttatacctcaattgtattttgtgctgttttccattttcatgccttgtaaataacttgtatagattgtggatcaaatactaaataaaaacttttaatgccaattaaatttgattcaagttaaaa

SEQ ID NO: 56 - DNA, 1351 bp, Homo sapiens
agctccggctccccctatataaatcggccatttgcttcgctccgccccgcagcgccggagtcaaagccggttcccggcccagtcccgtcctgcagcagtctgcctcctctttcaacatgacagatgccgctgtgtccttcgccaaggacttcctggcaggtggagtggccgcagccatctccaagacggcggtagcgcccatcgagcgggtcaagctgctgctgcaggtgcagcatgccagcaagcagatcactgcagataagcaatacaaaggcattatagactgcgtggtccgtattcccaaggagcagggagttctgtccttctggcgcggtaacctggccaatgtcatcagatacttccccacccaggctcttaacttcgccttcaaagataaatacaagcagatcttcctgggtggtgtggacaagagaacccagttttggctctactttgcagggaatctggcatcgggtggtgccgcaggggccacatccctgtgttttgtgtaccctcttgattttgcccgtacccgtctagcagctgatgtgggtaaagctggagctgaaagggaattccgaggcctcggtgactgcctggttaagatctacaaatctgatgggattaagggcctgtaccaaggctttaacgtgtctgtgcagggtattatcatctaccgagccgcctacttcggtatctatgacactgcaaagggaatgcttccggatcccaagaacactcacatcgtcatcagctggatgatcgcacagactgtcactgctgttgccgggttgacttcctatccatttgacactgttcgccgccgcatgatgatgcagtcagggcgcaaaggaactgacatcatgtacacaggcacgcttgactgctggcggaagattgctcgtgatgaaggaggcaaagcttttttcaagggtgcatggtccaatgttctcagaggcatgggtggtgcttttgtgcttgtcttgtatgatgaaatcaagaagtacacataagttatttcctaggatttttccccctgtgaacaggcatgttgtattatataacatatcttgagcattcttgacagactcctggctgtcagtttctcagtggcaactatttactggttgaaaatgggaagcaataatattcatctgaccagttttctcttaaagccatttccatgatgatgatgatgggactcaattgtattttttatttcagtcactcctgataaataacaaatttggagaaataaaaatatctaaaataaattttgtctgcagtatattttcatataaaaatgcatatttgagtgctacattcgaataaatactacctttttagtgaa

SEQ ID NO: 57 - DNA, 8789 bp, Homo sapiens
atgctcagtggcttctcgacaagttggcagcaacaacacggccctggtcgtcgtcgccgctgcggtaacggagcggtttgggtggcggagcctgcgttcgcgccttcccgctctcctcgggaggcccttcctgctctcccctaggctccgcggccgcccagggggtgggagcgggtgaggggagccaggcgcccagcgagagaggccccccgccgcagggcggcccgggagctcgaggcggtccggcccgcgcgggcagcggcgcggcgctgaggaggggcggcctggccgggacgcctcggggcgggggccgaggagctctccgggccgccggggaaagctacgggcccggtgcgtccgcggaccagcagcgcgggagagcggactcccctcgccaccgcccgagcccaggttatcctgaatacatgtctaacaattttccttgcaacgttagctgttgtttttcactgtttccaaaggatcaaaattgcttcagaaattggagacatatttgatttaaaaggaaaaacttgaacaaatggacaatatgtctattacgaatacaccaacaagtaatgatgcctgtctgagcattgtgcatagtttgatgtgccatagacaaggtggagagagtgaaacatttgcaaaaagagcaattgaaagtttggtaaagaagctgaaggagaaaaaagatgaattggattctttaataacagctataactacaaatggagctcatcctagtaaatgtgttaccatacagagaacattggatgggaggcttcaggtggctggtcggaaaggatttcctcatgtgatctatgcccgtctctggaggtggcctgatcttcacaaaaatgaactaaaacatgttaaatattgtcagtatgcgtttgacttaaaatgtgatagtgtctgtgtgaatccatatcactacgaacgagttgtatcacctggaattgatctctcaggattaacactgcagagtaatgctccatcaagtatgatggtgaaggatgaatatgtgcatgactttgagggacagccatcgttgtccactgaaggacattcaattcaaaccatccagcatccaccaagtaatcgtgcatcgacagagacatacagcaccccagctctgttagccccatctgagtctaatgctaccagcactgccaactttcccaacattcctgtggcttccacaagtcagcctgccagtatactggggggcagccatagtgaaggactgttgcagatagcatcagggcctcagccaggacagcagcagaatggatttactggtcagccagctacttaccatcataacagcactaccacctggactggaagtaggactgcaccatacacacctaatttgcctcaccaccaaaacggccatcttcagcaccacccgcctatgccgccccatcccggacattactggcctgttcacaatgagcttgcattccagcctcccatttccaatcatcctgctcctgagtattggtgttccattgcttactttgaaatggatgttcaggtaggagagacatttaaggttccttcaagctgccctattgttactgttgatggatacgtggacccttctggaggagatcgcttttgtttgggtcaactctccaatgtccacaggacagaagccattgagagagcaaggttgcacataggcaaaggtgtgcagttggaatgtaaaggtgaaggtgatgtttgggtcaggtgccttagtgaccacgcggtctttgtacagagttactacttagacagagaagctgggcgtgcacctggagatgctgttcataagatctacccaagtgcatatataaaggtctttgatttgcgtcagtgtcatcgacagatgcagcagcaggcggctactgcacaagctgcagcagctgcccaggcagcagccgtggcaggaaacatccctggcccaggatcagtaggtggaatagctccagctatcagtctgtcagctgctgctggaattggtgttgatgaccttcgtcgcttatgcatactcaggatgagttttgtgaaaggctggggaccggattacccaagacagagcatcaaagaaacaccttgctggattgaaattcacttacaccgggccctccagctcctagacgaagtacttcataccatgccgattgcagacccacaacctttagactgaggtcttttaccgttggggcccttaaccttatcaggatggtggactacaaaatacaatcctgtttataatctgaagatatatttcacttttgttctgctttatcttttcataaagggttgaaaatgtgtttgctgccttgctcctagcagacagaaactggattaaaacaattttttttttcctcttcagaacttgtcaggcatggctcagagcttgaagattaggagaaacacattcttattaattcttcacctgttatgtatgaaggaatcattccagtgctagaaaatttagccctttaaaacgtcttagagccttttatctgcagaacatcgatatgtatatcattctacagaataatccagtattgctgattttaaaggcagagaagttctcaaagttaattcacctatgttattttgtgtacaagttgttattgttgaacatacttcaaaaataatgtgccatgtgggtgagttaattttaccaagagtaactttactctgtgtttaaaaagtaagttaataatgtattgtaatctttcatccaaaatattttttgcaagttatattagtgaagatggtttcaattcagattgtcttgcaacttcagttttatttttgccaaggcaaaaaactcttaatctgtgtgtatattgagaatcccttaaaattaccagacaaaaaaatttaaaattacgtttgttattcctagtggatgactgttgatgaagtatacttttcccctgttaaacagtagttgtattcttctgtatttctaggcacaaggttggttgctaagaagcctataagaggaatttcttttccttcattcatagggaaaggttttgtattttttaaaacactaaaagcagcgtcactctacctaatgtctcactgttctgcaaaggtggcaatgcttaaactaaataatgaataaactgaatattttggaaactgctaaattctatgttaaatactgtgcagaataatggaaacattacagttcataataggtagtttggatatttttgtacttgatttgatgtgactttttttggtataatgtttaaatcatgtatgttatgatattgtttaaaattcagtttttgtatcttggggcaagactgcaaacttttttatatcttttggttattctaagccctttgccatcaatgatcatatcaattggcagtgactttgtatagagaatttaagtagaaaagttgcagatgtattgactgtaccacagacacaatatgtatgctttttacctagctggtagcataaataaaactgaatctcaacatacaaagttgaattctaggtttgatttttaagattttttttttcttttgcacttttgagtccaatctcagtgatgaggtaccttctactaaatgacaggcaacagccagttctattgggcagctttgtttttttccctcacactctaccgggacttccccatggacattgtgtatcatgtgtagagttggttttttttttttttaatttttattttactatagcagaaatagacctgattatctacaagatgataaatagattgtctacaggataaatagtatgaaataaaatcaaggattatctttcagatgtgtttacttttgcctggagaacttttagctatagaaacacttgtgtgatgatagtcctccttatatcacctggaatgaacacagcttctactgccttgctcagaaggtcttttaaatagaccatcctagaaaccactgagtttgcttatttctgtgatttaaacatagatcttgatccaagctacatgacttttgtctttaaataacttatctaccacctcatttgtactcttgattacttacaaattctttcagtaaacacctaattttcttctgtaaaagtttggtgatttaagttttattggcagttttataaaaagacatcttctctagaaattgctaactttaggtccattttactgtgaatgaggaataggagtgagttttagaataacagatttttaaaaatccagatgatttgattaaaaccttaatcatacattgacataattcattgcttcttttttttgagatatggagtcttgctgtgttgcccaggcaggagtgcagtggtatgatctcagctcactgcaacctctgcctcccgggttcaactgattctcctgcctcagcctccctggtagctaggattacaggtgcccgccaccatgcctggctaacttttgtagttttagtagagacggggttttgcctgttggccaggctggtcttgaactcctgacctcaagtgatccatccaccttggcctcccaaagtgctgggattacgggcgtgagccactgtccctggcctcattgttcccttttctactttaaggaaagttttcatgtttaatcatctggggaaagtatgtgaaaaatatttgttaagaagtatctctttggagccaagccacctgtcttggtttctttctactaagagccataaagtatagaaatacttctagttgttaagtgcttatatttgtacctagatttagtcacacgcttttgagaaaacatctagtatgttatgatcagctattcctgagagcttggttgttaatctatatttctatttcttagtggtagtcatctttgatgaataagactaaagattctcacaggtttaaaattttatgtctactttaagggtaaaattatgaggttatggttctgggtgggttttctctagctaattcatatctcaaagagtctcaaaatgttgaatttcagtgcaagctgaatgagagatgagccatgtacacccaccgtaagacctcattccatgtttgtccagtgcctttcagtgcattatcaaagggaatccttcatggtgttgcctttattttccggggagtagatcgtgggatatagtctatctcatttttaatagtttaccgcccctggtatacaaagataatgacaataaatcactgccatataaccttgctttttccagaaacatggctgttttgtattgctgtaaccactaaataggttgcctataccattcctcctgtgaacagtgcagatttacaggttgcatggtctggcttaaggagagccatacttgagacatgtgagtaaactgaactcatattagctgtgctgcatttcagacttaaaatccatttttgtggggcagggtgtggtgtgtaaaggggggtgtttgtaatacaagttgaaggcaaaataaaatgtcctgtctcccagatgatatacatcttattatttttaaagtttattgctaattgtaggaaggtgagttgcaggtatctttgactatggtcatctggggaaggaaaattttacattttactattaatgctccttaagtgtctatggaggttaaagaataaaatggtaaatgtttctgtgcctggtttgatggtaactggttaatagttactcaccattttatgcagagtcacattagttcacaccctttctgagagccttttgggagaagcagttttattctctgagtggaacagagttctttttgttgataatttctagtttgctcccttcgttattgccaactttactggcattttatttaatgatagcagattgggaaaatggcaaatttaggttacggaggtaaatgagtatatgaaagcaattacctctaaagccagttaacaattattttgtaggtggggtacactcagcttaaagtaatgcatttttttttcccgtaaaggcagaatccatcttgttgcagatagctatctaaataatctcatatcctcttttgcaaagactacagagaataggctatgacaatcttgttcaagcctttccatttttttccctgataactaagtaatttctttgaacataccaagaagtatgtaaaaagtccatggccttattcatccacaaagtggcatcctaggcccagccttatccctagcagttgtcccagtgctgctaggttgcttatcttgtttatctggaatcactgtggagtgaaattttccacatcatccagaattgccttatttaagaagtaaaacgttttaatttttagcctttttttggtggagttatttaatatgtatatcagaggatatactagatggtaacatttctttctgtgcttggctatctttgtggacttcaggggcttctaaaacagacaggactgtgttgcctttactaaatggtctgagacagctatggttttgaatttttagttttttttttttaacccacttcccctcctggtctcttccctctctgataattaccattcatatgtgagtgttagtgtgcctccttttagcattttcttcttctctttctgattcttcatttctgactgcctaggcaaggaaaccagataaccaaacttactagaacgttctttaaaacacaagtacaaactctgggacaggacccaagacactttcctgtgaagtgctgaaaaagacctcattgtattggcatttgatatcagtttgatgtagcttagagtgcttcctgattcttgctgagtttcaggtagttgagatagagagaagtgagtcatattcatattttcccccttagaataatattttgaaaggtttcattgcttccacttgaatgctgctcttacaaaaactggggttacaagggttactaaattagcatcagtagccagaggcaataccgttgtctggaggacaccagcaaacaacacacaacaaagcaaaacaaaccttgggaaactaaggccatttgttttgttttggtgtcccctttgaagccctgccttctggccttactcctgtacagatatttttgacctataggtgcctttatgagaattgagggtctgacatcctgccccaaggagtagctaaagtaattgctagtgttttcagggattttaacatcagactggaatgaatgaatgaaactttttgtcctttttttttctgtttttttttttctaatgtagtaaggactaaggaaaacctttggtgaagacaatcatttctctctgttgatgtggatacttttcacaccgtttatttaaatgctttctcaataggtccagagccagtgttcttgttcaacctgaaagtaatggctctgggttgggccagacagttgcactctctagtttgccctctgccacaaatttgatgtgtgacctttgggcaagtcatttatcttctctgggccttagttgcctcatctgtaaaatgagggagttggagtagattaattattccagctctgaaattctaagtgaccttggctaccttgcagcagttttggatttcttccttatctttgttctgctgtttgagggggctttttacttatttccatgttattcaaaggagactaggcttgatattttattactgttcttttatggacaaaaggttacatagtatgcccttaagacttaattttaaccaaaggcctagcaccaccttaggggctgcaataaacacttaacgcgcgtgcgcacgcgcgcgcgcacacacacacacacacacacacacacacacaggtcagagtttaaggctttcgagtcatgacattctagcttttgaattgcgtgcacacacacacgcacgcacacactctggtcagagtttattaaggctttcgagtcatgacattatagcttttgagttggtgtgtgtgacaccaccctcctaagtggtgtgtgcttgtaattttttttttcagtgaaaatggattgaaaacctgttgttaatgcttagtgatattatgctcaaaacaaggaaattcccttgaaccgtgtcaattaaactggtttatatgactcaagaaaacaataccagtagatgattattaactttattcttggctctttttaggtccattttgattaagtgacttttggctggatcattcagagctctcttctagcctacccttggatgagtacaattaatgaaattcatattttcaaggacctgggagccttccttggggctgggttgagggtggggggttggggagtcctggtagaggccagctttgtggtagctggagaggaagggatgaaaccagctgctgttgcaaaggctgcttgtcattgatagaaggactcacgggcttggattgattaagactaaacatggagttggcaaactttcttcaagtattgagttctgttcaatgcattggacatgtgatttaagggaaaagtgtgaatgcttatagatgatgaaaacctggtgggctgcagagcccagtttagaagaagtgagttgggggttggggacagatttggtggtggtatttcccaactgtttcctcccctaaattcagaggaatgcagctatgccagaagccagagaagagccactcgtagcttctgctttggggacaactggtcagttgaaagtcccaggagttcctttgtggctttctgtatacttttgcctggttaaagtctgtggctaaaaaatagtcgaacctttcttgagaactctgtaacaaagtatgtttttgattaaaagagaaagccaactaaaaaaaaaaaaaaaaaaaa

SEQ ID NO: 58 - DNA, 7014 bp, Homo sapiens
atccgggtcctgggcgagcgggcgccgtgcgcgtgtcccgcggccgagctgctaataaagttgcagcgaggagaagcgcagcgacggcgtcgggagagcgcgcctagccggctcgcgaaaaggaagctgttgaagttattgaagtacctgttgctatattctaagaaattaaaatgtccagaaatctgcctctgacttgacccaatgaaagaagcatatggcacttgtgaagataaatgttactcctccctttttaattggaacttctgcttaggacctgtgtatgacgtttcacctgtgatctgttctttcggtagccactgactttgagttacaggaaggtctccgaagatttgtgtcaaatgacgtcaatggccagcttgttttcttttactagtccagcagtaaagcgattgttgggctggaaacaaggtgatgaggaggagaaatgggcagaaaaggcagttgatgctttggtgaagaaactaaaaaagaaaaagggtgccatggaggaactggagaaagccttgagcagtccaggacagccgagtaaatgtgtcactattcccagatctttagatggacgcctgcaggtttctcacagaaaaggcttaccccatgttatatattgtcgtgtttggcgctggccggatttgcagagtcatcatgagctaaagccgttggatatttgtgaatttccttttggatctaagcaaaaagaagtttgtatcaacccataccactataagagagtggagagtccagtcttacctccagtattagtgcctcgtcataatgaattcaatccacaacacagccttctggttcagtttaggaacctgagccacaatgaaccacacatgccacaaaatgccacgtttccagattctttccaccagcccaacaacactccttttcccttatctccaaacagcccttatcccccttctcctgctagcagcacatatcccaactccccagcaagttctggaccaggaagtccatttcagctcccagctgatacgcctcctcctgcctatatgccacctgatgatcagatgggtcaagataattcccagcctatggatacaagcaataatatgattcctcagattatgcccagtatatccagcagggatgttcagcctgttgcctatgaagagcctaaacattggtgttcaatagtctactatgaattaaacaatcgtgttggagaagcttttcatgcatcttctactagtgtgttagtagatggattcacagatccttcaaataacaaaagtagattctgcttgggtttgttgtcaaatgttaatcgtaattcgacaattgaaaacactaggcgacatattggaaaaggtgttcatctgtactatgttggtggagaggtgtatgcggaatgcctcagtgacagcagcatatttgtacagagtaggaactgcaactttcatcatggctttcatcccaccactgtctgtaagattcccagcagctgcagcctcaaaatttttaacaatcaggagtttgctcagcttctggctcaatctgtcaaccatgggtttgaggcagtatatgagctcaccaaaatgtgtaccattcggatgagttttgtcaagggttggggagcagaatatcaccggcaggatgtaaccagcaccccatgttggattgagattcatcttcatgggcctcttcagtggctggataaagtccttactcagatgggctcccctctgaaccccatatcttctgtttcataatgcagaagtattcttttcaattatattgttagtggacttgttttaattttagagaaactttgagtacagatactgtgagcttacattgaaaacagatattacagcttatttttttctacataattgtgaccaatacatttgtattttgtgatgaatctacatttgtttgtattcatgttcatgtgattaactcttagaagtgttgtaaaagatgcagagtaagtattatgccccagttcagaaatttggcattgatcttaaactggaacatgcttttactttattgccctaacaattttttattaaatttatttgaaaatgcatcacatgatgaaaaattatagtagcttataagagggcatatacagtgaagagtaagttttccctcctactctcgatcttccagaagctgtacttttaccagtttctttgtcccaccaacttaaaaaaaaaaagtacaattcattgttttgcaaaagtgtatggtaggggcttaaaagaaactataaagttttatttgaatgaacactatgcactgctgtaactggtagtgttcagtaaaagcaaaatgatagttttctagatgacataaaatttacatttaatacagataagtgttcttcagtgtaatgtgacttcatgctatatatcttttgtaagacatttccttttttaaaaaaatttttgcaaataactgatctcaagtatatgtcatttactcaaaatctgtcataagcattactttatagctagtgacagtgcatgcacagccttgttcaactatgtttgctgcttttggacaatgttgcaagaactctatttttgacatgcattaatcttttattttgcacttttatgggtgacagtttttagcataacctttgataaaatacactcaagtgacttggacttagatgcttatccttacgtccttggtaccttttttgtattaacaaacactgcaatttatagattacatttgtaggaagttatgcttttttctggtttttgttttactttcaacctaggttataagactgttattctatagctccaacttaaggtgcctttttaattccctacagttttatgggtgttatcagtgctggagaatcatgtagttaatcccattgctcttacaagtgtcagcttacttgtatcagcctccctacgcaaggacctatgcactggagccgtaggaggctcttcagttgggccccaaggataaggctactgatttgatactaaatgaatcagcagtggatgtagggatagctgattttaaaacactcggctgggcacagtggctcacacctgtaatcccagcactttgggaggctgaggcaggcagatcatgatgtcaggagtttgagaccagcctggccaatatggtgaaaccctgtctctacaaaaaatacaaaaattagctgggcatggtggtgcgtgcctgaagtcccagctactcgggaagctgaggcagaagaatcacttgaacctgggaggcggaggttgtggtgagccgagatcgcaccactgcactccagcctgggcgacagagcgagactctgcctcaaaaaacaaaacaaaacaaaacactcacccatcaacgaatatagactcttctctcatttatcgatgatcctctttttccattttttaagtacttatgtggaagctagtctcccaaaacacaatctttagagagaaaagacatgaacgaactccaaaatatccatttaatcaatcatgtttttggctttggataaagaactttgaaccagtttttttctcaggagctgtcaaatggacacttaattatgacatgagaatgaagaaattattttggaaaaaaaaaatgacctaatttacctatcagtgaaagctttattttctggtgccttttgaaagtatatggagtcatatcattcttctgtttaaaatgttagtttggtttgactttccactttgtcctttctgctcttgtgaagaaaaaaaaaagcattttcgaggaaagaattatgcaatttcttttgttttctgtgtcattatttattgctttttcaatgtgcagccagtggatggttttagttctttcagatgaactgccatttgtgtttcagctcacagttctttgctgggtaaaagaaatactttctgacagtcacctgagccttaaatgtaagtattacatgacatgcattctgtttcttccagagttctgtctgccacacgaaagagaatatttgcttacttgatagaactttggcattttcatcattcttttacttaaccaggcttatggcatgatctctggaacaaatttgtaggaaaaaattactccaattgaatgactgatgtatgtaatcaacttcattgggctgcagtaaactagtggaaattagagagttgttttattggtgttttctactgtgagttaattaaaaattgtttttatttggggtcattatgtcacagtcttgagttaacaagatcttacgtgattggccttttctttgttttctcttaggagttgtgtctcatgaatgacagtactaaagctattaacaactaagagtttgacagagaactataagcctgttgtatctcctaaaagttgtcaactccccacccttggactttaaatgaaaattttattcagtccagctattcttacagtccctaaggattttcatatatctatgtataggagataaaatttgctagtaagatttttaaaaactggctagtgaaaggaaagtacctctgaaagaaaccattttagcaaattatggttatatgttttaatttaatctacagaatgttttatagtaaaattctagcaccactagaataatcacatagcatgtacaatatatttatgctggctgaaaagacagaatctgggaataataaaattgcaaccagtttggtaatgcaaacagcagaatagaatgaaatctcagtaatgaattaaagcaacaaaaagatattgattggcaaaaagcaagatataagagattcatttgcttaacatttctacataatatttatggtctggtcagtattggtctggtcagtattgcctggctgacgtgaaatgtaaactagtaggcgtgttattgatctgctaaaactaaccctctttttaagaggagatttaaggaagacgtcaatcaaaatgtcaaatatgtgtgtcagaatataaataatttttcacattgtattgttgctatataaaaaaaataatagaattggttgggtttctgaggtgaaatccagagtaagagtactagacagttcaacaagccacatctaatggcacagatagaggatgtagctattttatacctttcataacatttgagagtaagatatccttcaggatgtgaagtgattattaagtactcatacctgaaatctgttgtcaagattagaactggggttcatgttaaaaaccttccatattacctgagggtacctgtggggaacagttccttcccctgtgtggtagtattttgttggaagagaatgtttatacaaaaaatgaaattcttccaacagcagagaaactctaaaaagtttgatagtacctatcaaagtgctgtacttctgtgatagagaacatctgatgtaccaatttagatctatttctttatactttttctaatcaattgcttaatagtactttggatgattatcacctttgccacttaaaatatataaatatcctttttacttcatgaggaaggaagaattttttgataattactgagttcagccttttgtgatgacttatattttggacttacattttaactttaaagaatgtcagatcccttctttgtcttactagttaaatcctcacctaatctcttgggtatgaatataaatgtgtgtcatcgttatattgttcagctagatgagcaagtatcttagggtagtaggtagcctggtggttttagaagtgtttggtgatttttatggagagagttttcctaagtggtggtttataggtggtatcagatattattagggcagctttttggggagtaatctcaggtctcccagagcagcagcatttttctcattgatataagtaagattcttaggagcttttcttatcacacaagatgcctgaatcgaatgtgagaattgaaggcatttcttctgcataaacaaagaattctacctgctggacagaaacctggaaagttctttggaattcgctgaattacagtttagtatgtcctgattacagagtgacaatatttatcaagcctttgttatattggattatcttctctcttaaaatacaactgtattataattgaaatgacagcccaaaattggatggtttaccaaaaccaatgaaagggatttcacacatcaatttttatttctgttttgaagagcacatgctatataataattgctagtagcaactgcagtaaaacaggtgataagttattttctctgaaaagatccagtcctagagcaggattcttcgatcattcatggcagagtgaaaaaggtttgtatggttcttgtccaaataactcagttcttaaaattcttaaaatgatcgtaaaccattatcctttaaaggtttatttgaagatgctgttaaagtacagaattttgtgtacaggtagatttttccgtccctcattaatagtgccttcttaattaatacagactggtgttagctataacaaaactccagtaaggccaaagaatcccaagttctttgtggaaaaaaaaaaaaaatcttttagggtcagattttcccttctaatatcattgaagatgatgttgcattgatttattcataaagtattttaactataggaactctagaagataatggttaggcaagtgattttttttttaaatatggttggcgtaagttgtattttgaaattcacttattttaaaatcgaagaggattgtaatcatggaaatagaatgtttgtatctacctgcccacattttcttaaaaagatatttcatatacagataatgaagaccaagctagtggctgcactgtaggtctgctgcttatttgtatttgttgtgcttctgtttatgttgtagaagctgaaattctagcaacatgcttcaattctgttattttgatacttatgaaaatgtattaggttttactatattgtgcttttgaaagccataactcttaagaactttgtttttgcatattgtttgctaattctttactttaataaacctcaaaacctgc

SEQ ID NO: 59 - DNA, 2886 bp, Homo sapiens
cgatcgagggagctgagccgagagaaagagccgccgggcgctgcctcgccagacctcgctgggaccccggggccaccgggaggcacttttgtggaggggggagggggggcgacctcggcagcctcggcgcacgaagcgtccgagggcagcgtggggcgggctgcgacctctgcatcggtggactgcatttttaattaaggattcccagcagctctttgggatttttacagcttccactcatgtgttgacacccgcgtccaggagaaactcgctccaagtgcatctagcgcctgggacctgagacggcgttggcctttcgtgcatgcaaatccagggatttaggttttgtttgggatttccttttctttctttccttttttttttctttttgcagggagtaagaagggagctgggggtatcaacaagcctgcctttcggatcctgcgggaaaagcccatgtagttaagcgctttggtttaaaaaaaaggcaaggtaaaggcagggctttccagacacatttaggggttcgcgcgagcgctttgtgctcatggaccagccgcacaacttttgaaggctcgccggcccatgtggggtctttctggcggcgcgccgcctgcagcccccctaaagcgcgggggctggagttgttgagcagccccgccgctgtggtccatgtagccgctggccgcgcgcggactgcggctcggcgtgcgcgtgttcccggccgtcccgcctcggcgagctccctcatgttgtcgccctgcggcgccccttcgacgacaggctgtgcgcggtctgcacggcgctccgcggcggagcttcatgtggggctgcgacccgcgcagccggcgcctcgctgagggaacggacccccggtaaccggagaccgcctcccccccacccctggcgccaaaggatatcgtatgttcaggtccaaacgctcggggctggtgcggcgactttggcgaagtcgtgtggtccccgaccgggaggaaggcggcagcggcggcggcggtggcggcgacgaggatgggagcttgggcagccgagctgagccggccccgcgggcaagagagggcggaggctgcggccgctccgaagtccgcccggtagccccgcggcggccccgggacgcagtgggacagcgaggcgcccagggcgcggggaggcgccggcgcgcagggggccccccgaggcccatgtcggagccaggggccggcgctgggagctccctgctggacgtggcggagccgggaggcccgggctggctgcccgagagtgactgcgagacggtgacctgctgtctcttttcggagcgggacgccgccggcgcgccccgggacgccagcgaccccctggccggggcggccctggagccggcgggcggcgggcggagtcgcgaagcgcgctcgcggctgctgctgctggagcaggaactcaaaaccgtcacgtactcgctgctgaagcggctcaaggagcgctcgctggacacgctgctggaggcggtggagtcccgcggcggcgtgccgggcggctgcgtgctggtgccgcgcgccgacctccgcctgggcggccagcccgcgccgccgcagctgctgctcggccgcctctttcgctggcccgacctgcagcacgccgtggagctgaagcccctgtgcggctgccacagcttcgccgccgccgccgacggccctaccgtgtgctgcaacccctaccacttcagccggctctgcgggcccgaatctccgccacctccctactctcggctgtctcctcgcgacgagtacaagccactggatctgtccgattccacattgtcttacactgaaacggaggctaccaactccctcatcactgctccgggtgaattctcagacgccagcatgtctccggacgccaccaagccgagccactggtgcagcgtggcgtactgggagcaccggacgcgcgtgggccgcctctatgcggtgtacgaccaggccgtcagcatcttctacgacctacctcagggcagcggcttctgcctgggccagctcaacctggagcagcgcagcgagtcggtgcggcgaacgcgcagcaagatcggcttcggcatcctgctcagcaaggagcccgacggcgtgtgggcctacaaccgcggcgagcaccccatcttcgtcaactccccgacgctggacgcgcccggcggccgcgccctggtcgtgcgcaaggtgccccccggctactccatcaaggtgttcgacttcgagcgctcgggcctgcagcacgcgcccgagcccgacgccgccgacggcccctacgaccccaacagcgtccgcatcagcttcgccaagggctgggggccctgctactcccggcagttcatcacctcctgcccctgctggctggagatcctcctcaacaaccccagatagtggcggccccggcgggaggggcgggtgggaggccgcggccaccgccacctgccggcctcgagaggggccgatgcccagagacacagcccccacggacaaaaccccccagatatcatctacctagatttaatataaagttttatatattatatggaaatatatattatacttgtaattatggagtcatttttacaatgtaattatttatgtatggtgcaatgtgtgtatatggacaaaacaagaaagacgcactttggcttataattctttcaatacagatatattttctttctcttcctccttcctcttccttactttttatatatatatataaagaaaatgatacagcagagctaggtggaaaagcctgggtttggtgtatggtttttgagatattaatgcccagacaaaaagctaataccagtcactcgataataaagtattcgcattatagttttttttaaaaaaaaaa

SEQ ID NO: 60 - DNA, 3088 bp, Homo sapiens
cggagagccgcgcagggcgcgggccgcgcggggtggggcagccggagcgcaggcccccgatccccggcgggcgcccccgggcccccgcgcgcgccccggcctccgggagactggcgcatgccacggagcgcccctcgggccgccgccgctcctgcccgggcccctgctgctgctgctgtcgcctgcgcctgctgccccaactcggcgcccgacttcttcatggtgtgcggaggtcatgttcgctccttagcaggcaaacgacttttctcctcgcctcctcgccccgcatgttcaggaccaaacgatctgcgctcgtccggcgtctctggaggagccgtgcgcccggcggcgaggacgaggaggagggcgcagggggaggtggaggaggaggcgagctgcggggagaaggggcgacggacagccgagcgcatggggccggtggcggcggcccgggcagggctggatgctgcctgggcaaggcggtgcgaggtgccaaaggtcaccaccatccccacccgccagccgcgggcgccggcgcggccgggggcgccgaggcggatctgaaggcgctcacgcactcggtgctcaagaaactgaaggagcggcagctggagctgctgctccaggccgtggagtcccgcggcgggacgcgcaccgcgtgcctcctgctgcccggccgcctggactgcaggctgggcccgggggcgcccgccggcgcgcagcctgcgcagccgccctcgtcctactcgctccccctcctgctgtgcaaagtgttcaggtggccggatctcaggcattcctcggaagtcaagaggctgtgttgctgtgaatcttacgggaagatcaaccccgagctggtgtgctgcaacccccatcaccttagccgactctgcgaactagagtctcccccccctccttactccagatacccgatggattttctcaaaccaactgcagactgtccagatgctgtgccttcctccgctgaaacagggggaacgaattatctggcccctggggggctttcagattcccaacttcttctggagcctggggatcggtcacactggtgcgtggtggcatactgggaggagaagacgagagtggggaggctctactgtgtccaggagccctctctggatatcttctatgatctacctcaggggaatggcttttgcctcggacagctcaattcggacaacaagagtcagctggtgcagaaggtgcggagcaaaatcggctgcggcatccagctgacgcgggaggtggatggtgtgtgggtgtacaaccgcagcagttaccccatcttcatcaagtccgccacactggacaacccggactccaggacgctgttggtacacaaggtgttccccggtttctccatcaaggctttcgactacgagaaggcgtacagcctgcagcggcccaatgaccacgagtttatgcagcagccgtggacgggctttaccgtgcagatcagctttgtgaagggctggggccagtgctacacccgccagttcatcagcagctgcccgtgctggctagaggtcatcttcaacagccggtagccgcgtgcggaggggacagagcgtgagctgagcaggccacacttcaaactactttgctgctaatattttcctcctgagtgcttgcttttcatgcaaactctttggtcgttttttttttgtttgttggttggttttcttcttctcgtcctcgtttgtgttctgttttgtttcgctctttgagaaatagcttatgaaaagaattgttgggggtttttttggaagaaggggcaggtatgatcggcaggacaccctgataggaagaggggaagcagaaatccaagcaccaccaaacacagtgtatgaaggggggcggtcatcatttcacttgtcaggagtgtgtgtgagtgtgagtgtgcggctgtgtgtgcacgcgtgtgcaggagcggcagatggggagacaacgtgctctttgttttgtgtctcttatggatgtccccagcagagaggtttgcagtcccaagcggtgtctctcctgccccttggacacgctcagtggggcagaggcagtacctgggcaagctggcggctggggtcccagcagctgccaggagcacggctctgtccccagcctgggaaagcccctgcccctcctctccctcatcaaggacacgggcctgtccacaggcttctgagcagcgagcctgctagtggccgaaccagaaccaattattttcatccttgtcttattcccttcctgccagcccctgccattgtagcgtctttcttttttggccatctgctcctggatctccctgagatgggcttcccaagggctgccggggcagccccctcacagtattgctcacccagtgccctctcccctcagcctctcccctgcctgccctggtgacatcaggtttttcccggacttagaaaaccagctcagcactgcctgctcccatcctgtgtgttaagctctgctattaggccagcaagcggggatgtccctgggagggacatgcttagcagtccccttccctccaagaaggatttggtccgtcataacccaaggtaccatcctaggctgacacctaactcttctttcatttcttctacaactcatacactcgtatgatacttcgacactgttcttagctcaatgagcatgtttagactttaacataagctatttttctaactacaaaggtttaaatgaacaagagaagcattctcattggaaatttagcattgtagtgctttgagagagaaaggactcctgaaaaaaaacctgagatttattaaagaaaaaaatgtattttatgttatatataaatatattattacttgtaaatataaagacgttttataagcatcattatttatgtattgtgcaatgtgtataaacaagaaaaataaagaaaagatgcactttgctttaatataaatgcaaataacaaatgccaaattaaaaaagataaacacaagattggtgtttttttctatgggtgttatcacctagctgaatgtttttctaaaggagtttatgttccattaaacgatttttaaaatgtacacttgaa

SEQ ID NO: 61 - DNA, 1722 bp, Homo sapiens
attcattgcgccgcggcacggcctagcgagtggttcttctgcgctactgctgcgcgaatcggcgaccccagtgcctcgaccactatgccgcgctctttcctcgtcaggaagccctccgaccccaatcggaagcctaactacagcgagctgcaggactctaatccagagtttaccttccagcagccctacgaccaggcccacctgctggcagccatcccacctccggagatcctcaaccccaccgcctcgctgccaatgctcatctgggactctgtcctggcgccccaagcccagccaattgcctgggcctcccttcggctccaggagagtcccagggtggcagagctgacctccctgtcagatgaggacagtgggaaaggctcccagccccccagcccaccctcaccggctccttcgtccttctcctctacttcagtctcttccttggaggccgaggcctatgctgccttcccaggcttgggccaagtgcccaagcagctggcccagctctctgaggccaaggatctccaggctcgaaaggccttcaactgcaaatactgcaacaaggaatacctcagcctgggtgccctcaagatgcacatccgaagccacacgctgccctgcgtctgcggaacctgcgggaaggccttctctaggccctggctgctacaaggccatgtccggacccacactggcgagaagcccttctcctgtccccactgcagccgtgccttcgctgaccgctccaacctgcgggcccacctccagacccactcagatgtcaagaagtaccagtgccaggcgtgtgctcggaccttctcccgaatgtccctgctccacaagcaccaagagtccggctgctcaggatgtccccgctgaccctcgaggctccctcttcctctccatacctgcccctgcctgacagccttccccagctccagcaggaaggaccccacatccttctcactgccatggaattccctcctgagtgccccacttctggccacatcagccccacaggactttgatgaagaccattttctggttctgtgtcctctgcctgggctctggaagaggccttcccatggccatttctgtggagggagggcagctggcccccagccctgggggattcctgagctggcctgtctgcgtgggtttttgtatccagagctgtttggatacagctgctttgagctacaggacaaaggctgacagactcactgggaagctcccaccccactcaggggaccccactcccctcacacacacccccccacaaggaaccctcaggccaccctccacgaggtgtgactaactatgcaataatccacccccaggtgcagccccagggcctgcggaggcggtggcagactagagtctgagatgccccgagcccaggcagctatttcagcctcctgtttggtggggtggcacctgtttcccgggcaatttaacaatgtctgaaaagggactgtgagtaatggctgtcacttgtcgggggcccaagtggggtgctctggtctgaccgatgtgtctcccagaactattctgggggcccgacaggtgggcctgggaggaagatgtttacatttttaaaggtacactggtatttatatttcaaacattttgtatcaaggaaacgttttgtatagttatatgtacagtttattgatattcaataaagcagttaatttatatattaaaaaaaaaaaaaaaaaa

SEQ ID NO: 62 - DNA, 2112 bp, Homo sapiens
aaaacgggctcagttcgtaaaggagccgggtgacttcagaggcgccggcccgtccgtctgccgcacctgagcacggcccctgcccgagcctggcccgccgcgatgctgtagggaccgccgtgtcctcccgccggaccgttatccgcgccgggcgcccgccagacccgctggcaagatgccgcgctccttcctggtcaagaagcatttcaacgcctccaaaaagccaaactacagcgaactggacacacatacagtgattatttccccgtatctctatgagagttactccatgcctgtcataccacaaccagagatcctcagctcaggagcatacagccccatcactgtgtggactaccgctgctccattccacgcccagctacccaatggcctctctcctctttccggatactcctcatctttggggcgagtgagtccccctcctccatctgacacctcctccaaggaccacagtggctcagaaagccccattagtgatgaagaggaaagactacagtccaagctttcagacccccatgccattgaagctgaaaagtttcagtgcaatttatgcaataagacctattcaactttttctgggctggccaaacataagcagctgcactgcgatgcccagtctagaaaatctttcagctgtaaatactgtgacaaggaatatgtgagcctgggcgccctgaagatgcatattcggacccacacattaccttgtgtttgcaagatctgcggcaaggcgttttccagaccctggttgcttcaaggacacattagaactcacacgggggagaagcctttttcttgccctcactgcaacagagcatttgcagacaggtcaaatctgagggctcatctgcagacccattctgatgtaaagaaataccagtgcaaaaactgctccaaaaccttctccagaatgtctctcctgcacaaacatgaggaatctggctgctgtgtagcacactgagtgacgcaatcaatgtttactcgaacagaatgcatttcttcactccgaagccaaatgacaaataaagtccaaaggcattttctcctgtgctgaccaaccaaataatatgtatagacacacacacatatgcacacacacacacacacacccacagagagagagctgcaagagcatggaattcatgtgtttaaagataatcctttccatgtgaagtttaaaattactatatatttgctgatggctagattgagagaataaaagacagtaacctttctcttcaaagataaaatgaaaagcacattgcatcttttcttcctaaaaaaatgcaaagatttacattgctgccaaatcatttcaactgaaaagaacagtattgctttgtaatagagtctgtaataggatttcccataggaagagatctgccagacgcgaactcaggtgccttaaaaagtattccaagtttactccattacatgtcggttgtctggttgccattgttgaactaaagcctttttttgattacctgtagtgctttaaagtatatttttaaaagggaggaaaaaaataacaagaacaaaacacaggagaatgtattaaaagtatttttgttttgttttgtttttgccaattaacagtatgtgccttgggggaggagggaaagattagctttgaacattcctggcgcatgctccattgtcttactattttaaaacattttaataatttttgaaaattaattaaagatgggaataagtgcaaaagaggattcttacaaattcattaatgtacttaaactatttcaaatgcataccacaaatgcaataatacaataccccttccaagtgcctttttaaattgtatagttgatgagtcaatgtaaatttgtgtttatttttatatgattgaatgagttctgtatgaaactgagatgttgtctatagctatgtctataaacaacctgaagacttgtgaaatcaatgtttcttttttaaaaaacaattttcaagttttttttacaataaacagttttgatttaaaatctcgtttgtatactattttcagagactttacttgcttcatgattagtaccaaaccactgtacaaagaattgtttgttaacaagaaaaaaa

SEQ ID NO: 63 - DNA, 3173 bp, Homo sapiens
cggcgggcggcagcagcctaggcagcagcagtagcagaagcagcagccgccgagcagcagcaaggactctggagtcagagtaggactgtaggaccggagcctgagtggaacaggagtggagctggcctgggagagagcggatccctcccagcaccctcaggccacccgttgcctgcactctccctgccagacctccagagaggagagactcgggacagccagccccaggttcccccagctctctccatctgcctggctccttgggacccgttccccagcctcaggatggcgtcctccctgcttgaggaggaagttcactatggctccagtcccctggccatgctgacggcagcgtgcagcaaatttggtggctctagccctctgcgggactcaacaactctgggcaaagcaggcacaaagaagccgtactctgtgggcagtgacctttcagcctccaaaaccatgggggatgcttatccagccccctttacaagcactaatgggctcctttcacctgcaggcagtcctccagcacccacctcaggctatgctaatgattaccctcccttttcccactcattccctgggcccacaggcacccaggaccctgggctactagtgcccaaggggcacagctcttctgactgtctgcccagtgtctacacctctctggacatgacacacccctatggctcctggtacaaggcaggcatccatgcaggcatttcaccaggcccaggcaacactcctactccatggtgggatatgcaccctggaggcaactggctaggtggtgggcagggccagggtgatgggctgcaagggacactgcccacaggtccagctcagcctccactgaacccccagctgcccacctacccatctgactttgctccccttaatccagccccctacccagctccccacctcttgcaaccagggccccagcatgtcttgccccaagatgtctataaacccaaggcagtgggaaatagtgggcagctagaagggagtggtggagccaaacccccacggggtgcaagcactgggggtagtggtggatatgggggcagtggggcagggcgctcctcctgcgactgccctaattgccaggagctagagcggctgggagcagcagcggctgggctgcggaagaagcccatccacagctgccacatccctggctgcggcaaggtgtatggcaaggcttcgcacctgaaggcccacttgcgctggcacacaggcgagaggcccttcgtctgcaactggctcttctgcggcaagaggttcactcgttcggatgagctggagcgtcatgtgcgcactcacacccgggagaagaagttcacctgcctgctctgctccaagcgctttacccgaagcgaccacctgagcaaacaccagcgcacccatggagaaccaggcccgggtccccctcccagtggccccaaggagctgggggagggccgcagcacgggggaagaggaggccagtcagacgccccgaccttctgcctcgccagcaaccccagagaaagcccctggaggcagccctgagcagagcaacttgctggagatctgagccgggtggaaggtctcccaccccagggctgccctgacagtctctcttggctctctagaccactgcttgccaatcactctctttaccccatgcatgccatccttcggggctctctccctctgtctccctcctggccattctgggcttgggtatctccttgcatgcctcctcagctcaccttctctcttcaccatgagactggctttccacaaactctcatctcaggccctccccttgtgcctgatacctgcactccggcttcctagactctggccctgccacaccaacacactttctatttgggctcccaacactatttctccatctcactccttgacatgtacccctttctgcttctcaagcttatttcctgctgtccctcagcctccaggcttcagtcttcccaacttcttacaccattgctttccattctccagaactcttttttcctttttacaaacacaatgataatgataatttattgccccctggtggcctcttcatcaggggtattggggttagtgacctggccagagggtgccaagaggggggcagaccagtggggatctgatcccaaagatggggtgaccccagggtcagggaggctgcccccaggcctgtatatttaacccctatgtaccaggagtaatgaatagtaataattctatttatgtaagttatgatgacgggtcaggtagagtgagctggggagggaagtggatccatttctgctaaggaaattctagtcaaatgcatctctgtatagacaaaatgttagtggagaagatcttgttaatagaatgtctatcatcagaatctcagttgatagggtttctcttgtaatgaagtctctacaaattgggttagctacatctctgctaaacagttgatggggtatctcttgattagggggatccctaatatccccagccccagccagaagctgtgaaacctcaagtcctatggaggggagaaggactggaatgtaccccatctcccttgactgcagagcaggttcctccactgccccaccccttagacaccatgaccccatcaggttaatcccctgttgccatggttatggagagcttgcagctgccatcttagatgtgctctttggggaagcccatctaacaggaggacattggtttgggggtgcacctcctgaagaatgggtggggaaggctttctctaggatcagattcaaataagtatgtattgagtgcctactctgtgcaaggcactatgctagatctggtgcctagaagccctgagaaagaacttaaagagctaggaggacagaggcccccaagctgatctggtggtgcatccacgcacccccaccctgggactttggatgctcccatctccacctccagtgacttttaaagccgcttcgtgcctttcctgtaacgttggatcctccttttctgtcccctgctgtctcaaggccccaagttaaagggttaaagccgctggagcttggggagagaacattgtggaatggaagggatcatgccctttgtggagtcttttttttttaatttaataaataaaagttggatttgaaaaaaaaaaaaaaaaaaaaaaaa

SEQ ID NO: 64 - DNA, 1616 bp, Homo sapiens
ctccctgtgttggtggaggatgtctgcagcagcatttaaattctgggagggcttggttgtcagcagcagcaggaggaggcagagcacagcatcgtcgggaccagactcgtctcaggccagttgcagccttctcagccaaacgccgaccaaggaaaactcactaccatgagaattgcagtgatttgcttttgcctcctaggcatcacctgtgccataccagttaaacaggctgattctggaagttctgaggaaaagcagctttacaacaaatacccagatgctgtggccacatggctaaaccctgacccatctcagaagcagaatctcctagccccacagacccttccaagtaagtccaacgaaagccatgaccacatggatgatatggatgatgaagatgatgatgaccatgtggacagccaggactccattgactcgaacgactctgatgatgtagatgacactgatgattctcaccagtctgatgagtctcaccattctgatgaatctgatgaactggtcactgattttcccacggacctgccagcaaccgaagttttcactccagttgtccccacagtagacacatatgatggccgaggtgatagtgtggtttatggactgaggtcaaaatctaagaagtttcgcagacctgacatccagtaccctgatgctacagacgaggacatcacctcacacatggaaagcgaggagttgaatggtgcatacaaggccatccccgttgcccaggacctgaacgcgccttctgattgggacagccgtgggaaggacagttatgaaacgagtcagctggatgaccagagtgctgaaacccacagccacaagcagtccagattatataagcggaaagccaatgatgagagcaatgagcattccgatgtgattgatagtcaggaactttccaaagtcagccgtgaattccacagccatgaatttcacagccatgaagatatgctggttgtagaccccaaaagtaaggaagaagataaacacctgaaatttcgtatttctcatgaattagatagtgcatcttctgaggtcaattaaaaggagaaaaaatacaatttctcactttgcatttagtcaaaagaaaaaatgctttatagcaaaatgaaagagaacatgaaatgcttctttctcagtttattggttgaatgtgtatctatttgagtctggaaataactaatgtgtttgataattagtttagtttgtggcttcatggaaactccctgtaaactaaaagcttcagggttatgtctatgttcattctatagaagaaatgcaaactatcactgtattttaatatttgttattctctcatgaatagaaatttatgtagaagcaaacaaaatacttttacccacttaaaaagagaatataacattttatgtcactataatcttttgttttttaagttagtgtatattttgttgtgattatctttttgtggtgtgaataaatcttttatcttgaatgtaataagaatttggtggtgtcaattgcttatttgttttcccacggttgtccagcaattaataaaacataaccttttttactgcctaaaaaaaaaaaaaaaaaaaaaaaaaaaaaaaaaa

SEQ ID NO: 65 - DNA, 1574 bp, Homo sapiens
tcaccacggcggcagccctttaaacccctcacccagccagcgccccatcctgtctgtccgaacccagacacaagtcttcactccttcctgcgagccctgaggaagccttgtgagtgcattggctggggcttggagggaagttgggctggagctggacaggagcagtgggtgcatttcaggcaggctctcctgaggtcccaggcgccagctccagctccctggctagggaaacccaccctctcagtcagcatgggggcccaagctccaggcagggtgggctggatcactagcgtcctggatctctctcagactgggcagccccgggctcattgaaatgccccggatgacttggctagtgcagaggaattgatggaaaccaccggggtgagagggaggctccccatctcagccagccacatccacaaggtgtgtgtaagggtgcaggcgccggccggttaggccaaggctctactgtctgttgcccctccaggagaacttccaaggagctttccccagacatggccaacaagggtccttcctatggcatgagccgcgaagtgcagtccaaaatcgagaagaagtatgacgaggagctggaggagcggctggtggagtggatcatagtgcagtgtggccctgatgtgggccgcccagaccgtgggcgcttgggcttccaggtctggctgaagaatggcgtgattctgagcaagctggtgaacagcctgtaccctgatggctccaagccggtgaaggtgcccgagaacccaccctccatggtcttcaagcagatggagcaggtggctcagttcctgaaggcggctgaggactatggggtcatcaagactgacatgttccagactgttgacctctttgaaggcaaagacatggcagcagtgcagaggaccctgatggctttgggcagcttggcagtgaccaagaatgatgggcactaccgtggagatcccaactggtttatgaagaaagcgcaggagcataagagggaattcacagagagccagctgcaggagggaaagcatgtcattggccttcagatgggcagcaacagaggggcctcccaggccggcatgacaggctacggacgacctcggcagatcatcagttagagcggagagggctagccctgagcccggccctcccccagctccttggctgcagccatcccgcttagcctgcctcacccacacccgtgtggtaccttcagccctggccaagctttgaggctctgtcactgagcaatggtaactgcacctgggcagctcctccctgtgcccccagcctcagcccaacttcttacccgaaagcatcactgccttggcccctccctcccggctgcccccatcacctctactgtctcctccctgggctaagcaggggagaagcgggctgggggtagcctggatgtgggccaagtccactgtcctccttggcggcaaaagcccattgaagaagaaccagcccagcctgccccctatcttgtcctggaatatttttggggttggaactcaaaaaaaaaaaaaaaaaatcaatcttttctcaaaaaaaaaaaaaaaaaa

SEQ ID NO: 66 - DNA, 3829 bp, Homo sapiens
caggcagcgctgcgtcctgctgcgcacgtgggaagccctggccccggccacccccgcgatgccgcgcgctccccgctgccgagccgtgcgctccctgctgcgcagccactaccgcgaggtgctgccgctggccacgttcgtgcggcgcctggggccccagggctggcggctggtgcagcgcggggacccggcggctttccgcgcgctggtggcccagtgcctggtgtgcgtgccctgggacgcacggccgccccccgccgccccctccttccgccaggtgtcctgcctgaaggagctggtggcccgagtgctgcagaggctgtgcgagcgcggcgcgaagaacgtgctggccttcggcttcgcgctgctggacggggcccgcgggggcccccccgaggccttcaccaccagcgtgcgcagctacctgcccaacacggtgaccgacgcactgcgggggagcggggcgtgggggctgctgctgcgccgcgtgggcgacgacgtgctggttcacctgctggcacgctgcgcgctctttgtgctggtggctcccagctgcgcctaccaggtgtgcgggccgccgctgtaccagctcggcgctgccactcaggcccggcccccgccacacgctagtggaccccgaaggcgtctgggatgcgaacgggcctggaaccatagcgtcagggaggccggggtccccctgggcctgccagccccgggtgcgaggaggcgcgggggcagtgccagccgaagtctgccgttgcccaagaggcccaggcgtggcgctgcccctgagccggagcggacgcccgttgggcaggggtcctgggcccacccgggcaggacgcgtggaccgagtgaccgtggtttctgtgtggtgtcacctgccagacccgccgaagaagccacctctttggagggtgcgctctctggcacgcgccactcccacccatccgtgggccgccagcaccacgcgggccccccatccacatcgcggccaccacgtccctgggacacgccttgtcccccggtgtacgccgagaccaagcacttcctctactcctcaggcgacaaggagcagctgcggccctccttcctactcagctctctgaggcccagcctgactggcgctcggaggctcgtggagaccatctttctgggttccaggccctggatgccagggactccccgcaggttgccccgcctgccccagcgctactggcaaatgcggcccctgtttctggagctgcttgggaaccacgcgcagtgcccctacggggtgctcctcaagacgcactgcccgctgcgagctgcggtcaccccagcagccggtgtctgtgcccgggagaagccccagggctctgtggcggcccccgaggaggaggacacagacccccgtcgcctggtgcagctgctccgccagcacagcagcccctggcaggtgtacggcttcgtgcgggcctgcctgcgccggctggtgcccccaggcctctggggctccaggcacaacgaacgccgcttcctcaggaacaccaagaagttcatctccctggggaagcatgccaagctctcgctgcaggagctgacgtggaagatgagcgtgcgggactgcgcttggctgcgcaggagcccaggggttggctgtgttccggccgcagagcaccgtctgcgtgaggagatcctggccaagttcctgcactggctgatgagtgtgtacgtcgtcgagctgctcaggtctttcttttatgtcacggagaccacgtttcaaaagaacaggctctttttctaccggaagagtgtctggagcaagttgcaaagcattggaatcagacagcacttgaagagggtgcagctgcgggagctgtcggaagcagaggtcaggcagcatcgggaagccaggcccgccctgctgacgtccagactccgcttcatccccaagcctgacgggctgcggccgattgtgaacatggactacgtcgtgggagccagaacgttccgcagagaaaagagggccgagcgtctcacctcgagggtgaaggcactgttcagcgtgctcaactacgagcgggcgcggcgccccggcctcctgggcgcctctgtgctgggcctggacgatatccacagggcctggcgcaccttcgtgctgcgtgtgcgggcccaggacccgccgcctgagctgtactttgtcaaggtggatgtgacgggcgcgtacgacaccatcccccaggacaggctcacggaggtcatcgccagcatcatcaaaccccagaacacgtactgcgtgcgtcggtatgccgtggtccagaaggccgcccatgggcacgtccgcaaggccttcaagagccacgtctctaccttgacagacctccagccgtacatgcgacagttcgtggctcacctgcaggagaccagcccgctgagggatgccgtcgtcatcgagcagagctcctccctgaatgaggccagcagtggcctcttcgacgtcttcctacgcttcatgtgccaccacgccgtgcgcatcaggggcaagtcctacgtccagtgccaggggatcccgcagggctccatcctctccacgctgctctgcagcctgtgctacggcgacatggagaacaagctgtttgcggggattcggcgggacgggctgctcctgcgtttggtggatgatttcttgttggtgacacctcacctcacccacgcgaaaaccttcctcagctatgcccggacctccatcagagccagtctcaccttcaaccgcggcttcaaggctgggaggaacatgcgtcgcaaactctttggggtcttgcggctgaagtgtcacagcctgtttctggatttgcaggtgaacagcctccagacggtgtgcaccaacatctacaagatcctcctgctgcaggcgtacaggtttcacgcatgtgtgctgcagctcccatttcatcagcaagtttggaagaaccccacatttttcctgcgcgtcatctctgacacggcctccctctgctactccatcctgaaagccaagaacgcagggatgtcgctgggggccaagggcgccgccggccctctgccctccgaggccgtgcagtggctgtgccaccaagcattcctgctcaagctgactcgacaccgtgtcacctacgtgccactcctggggtcactcaggacagcccagacgcagctgagtcggaagctcccggggacgacgctgactgccctggaggccgcagccaacccggcactgccctcagacttcaagaccatcctggactgatggccacccgcccacagccaggccgagagcagacaccagcagccctgtcacgccgggctctacgtcccagggagggaggggcggcccacacccaggcccgcaccgctgggagtctgaggcctgagtgagtgtttggccgaggcctgcatgtccggctgaaggctgagtgtccggctgaggcctgagcgagtgtccagccaagggctgagtgtccagcacacctgccgtcttcacttccccacaggctggcgctcggctccaccccagggccagcttttcctcaccaggagcccggcttccactccccacataggaatagtccatccccagattcgccattgttcacccctcgccctgccctcctttgccttccacccccaccatccaggtggagaccctgagaaggaccctgggagctctgggaatttggagtgaccaaaggtgtgccctgtacacaggcgaggaccctgcacctggatgggggtccctgtgggtcaaattggggggaggtgctgtgggagtaaaatactgaatatatgagtttttcagttttgaaaaaaa

SEQ ID NO: 67 - DNA, 6244 bp, Homo sapiens
ggcgaggcgaggtttgctggggtgaggcagcggcgcggccgggccgggccgggccacaggcggtggcggcgggaccatggaggcggcggtcgctgctccgcgtccccggctgctcctcctcgtgctggcggcggcggcggcggcggcggcggcgctgctcccgggggcgacggcgttacagtgtttctgccacctctgtacaaaagacaattttacttgtgtgacagatgggctctgctttgtctctgtcacagagaccacagacaaagttatacacaacagcatgtgtatagctgaaattgacttaattcctcgagataggccgtttgtatgtgcaccctcttcaaaaactgggtctgtgactacaacatattgctgcaatcaggaccattgcaataaaatagaacttccaactactggtttaccattgcttgttcagagaacaattgcgagaactattgtgttacaagaaagcattggcaaaggtcgatttggagaagtttggagaggaaagtggcggggagaagaagttgctgttaagatattctcctctagagaagaacgttcgtggttccgtgaggcagagatttatcaaactgtaatgttacgtcatgaaaacatcctgggatttatagcagcagacaataaagacaatggtacttggactcagctctggttggtgtcagattatcatgagcatggatccctttttgattacttaaacagatacacagttactgtggaaggaatgataaaacttgctctgtccacggcgagcggtcttgcccatcttcacatggagattgttggtacccaaggaaagccagccattgctcatagagatttgaaatcaaagaatatcttggtaaagaagaatggaacttgctgtattgcagacttaggactggcagtaagacatgattcagccacagataccattgatattgctccaaaccacagagtgggaacaaaaaggtacatggcccctgaagttctcgatgattccataaatatgaaacattttgaatccttcaaacgtgctgacatctatgcaatgggcttagtattctgggaaattgctcgacgatgttccattggtggaattcatgaagattaccaactgccttattatgatcttgtaccttctgacccatcagttgaagaaatgagaaaagttgtttgtgaacagaagttaaggccaaatatcccaaacagatggcagagctgtgaagccttgagagtaatggctaaaattatgagagaatgttggtatgccaatggagcagctaggcttacagcattgcggattaagaaaacattatcgcaactcagtcaacaggaaggcatcaaaatgtaattctacagctttgcctgaactctccttttttcttcagatctgctcctgggttttaatttgggaggtcaattgttctacctcactgagagggaacagaaggatattgcttccttttgcagcagtgtaataaagtcaattaaaaacttcccaggatttctttggacccaggaaacagccatgtgggtcctttctgtgcactatgaacgcttctttcccaggacagaaaatgtgtagtctacctttattttttattaacaaaacttgttttttaaaaagatgattgctggtcttaactttaggtaactctgctgtgctggagatcatctttaagggcaaaggagttggattgctgaattacaatgaaacatgtcttattactaaagaaagtgatttactcctggttagtacattctcagaggattctgaaccactagagtttccttgattcagactttgaatgtactgttctatagtttttcaggatcttaaaactaacacttataaaactcttatcttgagtctaaaaatgacctcatatagtagtgaggaacataattcatgcaattgtattttgtatactattattgttctttcacttattcagaacattacatgccttcaaaatgggattgtactataccagtaagtgccacttctgtgtctttctaatggaaatgagtagaattgctgaaagtctctatgttaaaacctatagtgtttgaattcaaaaagcttatttatctgggtaacccaaactttttctgttttgtttttggaagggtttttgtggtatgtcatttggtattctattctgaaaatgcctttctcctaccaaaatgtgcttaagccactaaagaaatgaagtggcattaattagtaaattattagcatggtcatgtttgaatattctcacatcaagcttttgcattttaattgtgttgtctaagtatacttttaaaaaatcaagtggcactctagatgcttatagtactttaatatttgtagcatacagactaatttttctaaaagggaaagtctgtctagctgcttgtgaaaagttatgtggtattctgtaagccatttttttctttatctgttcaaagacttattttttaagacatgaattacatttaaaattagaatatggttaatattaaataataggcctttttctaggaaggcgaaggtagttaataatttgaatagataacagatgtgcaagaaagtcacatttgttatgtatgtaggagtaaacgttcggtggatcctctgtctttgtaactgaggttagagctagtgtggttttgaggtctcactacactttgaggaaggcagcttttaattcagtgtttccttatgtgtgcgtacattgcaactgcttacatgtaatttatgtaatgcattcagtgcacccttgttacttgggagaggtggtagctaaagaacattctgagtataggtttttctccatttacagatgtctttggtcaaatattgaaagcaaacttgtcatggtcttcttacattaagttgaaactagcttataataactggtttttacttccaatgctatgaagtctctgcagggcttttacagttttcgaagtccttttatcactgtgatcttattctgaggggagaaaaaactatcatagctctgaggcaagacttcgactttatagtgctatcagttccccgatacagggtcagagtaacccatacagtattttggtcaggaagagaaagtggccatttacactgaatgagttgcattctgataatgtcttatctcttatacgtagaataaatttgaaagactatttgatcttaaaaccaaagtaattttagaatgagtgacatattacataggaatttagtgtcaatttcatgtgtttaaaaacatcatgggaaaaatgcttagaggttactattttgactacaaagttgagtttttttctgtagttaccataatttcattgaagcaaatgaatgagtttgagaggtttgtttttatagttgtgttgtattacttgtttaataataatctctaattctgtgatcaggtactttttttgtgggggttttttttttgtttttttttttttgttgttgtttttgggccatttctaagcctaccagatctgctttatgaaatccaggggaccaatgcattttatcactaaaactatttttatataattttaagaatataccaaaagttgtctgatttaaagttgtaatacatgatttctcactttcatgtaaggttatccacttttgctgaagatattttttattgaatcaaagattgagttacaattatacttttcttacctaagtggataaaatgtacttttgatgaatcagggaatttttttaaagttggagtttagttctaaattgactttacgtattactgcagttaattccttttttggctagggatggtttgataaaccacaattggctgatattgaaaatgaaagaaacttaaaaggtgggatggatcatgattactgtcgataactgcagataaatttgattagagtaataattttgtcatttaaaaacacagttgtttatactgcccatcctaggatgctcaccttccaagattcaacgtggctaaaacatcttctggtaaattgtgcgtccatattcattttgtcagtagccaggagaaatggggatgggggaaatacgacttagtgaggcatagacatccctggtccatcctttctgtctccagctgtttcttggaacctgctctcctgcttgctggtccctgacgcagagaccgttgcctcccccacagccgtttgactgaaggctgctctggagacctagagtaaaacggctgatggaagttgtgggacccacttccatttccttcagtcattagaggtggaagggaggggtctccaagtttggagattgagcagatgaggcttgggatgcccctgctttgacttcagccatggatgaggagtgggatggcagcaaggtggctcctgtggcagtggagttgtgccagaaacagtggccagttgtatcgcctataagacagggtaaggtctgaagagctgagcctgtaattctgctgtaataatgatagtgctcaagaagtgccttgagttggtgtacagtgccatggccatcaagaatcccagatttcaggttttattacaaaatgtaagtggtcacttggcgattttgtagtacatgcatgagttaccttttttctctatgtctgagaactgtcagattaaaacaagatggcaaagagatcgttagagtgcacaacaaaatcactatcccattagacacatcatcaaaagcttatttttattcttgcactggaagaatcgtaagtcaactgtttcttgaccatggcagtgttctggctccaaatggtagtgattccaaataatggttctgttaacactttggcagaaaatgccagctcagatattttgagatactaaggattatctttggacatgtactgcagcttcttgtctctgttttggattactggaatacccatgggccctctcaagagtgctggacttctaggacattaagatgattgtcagtacattaaacttttcaatcccattatgcaatcttgtttgtaaatgtaaacttctaaaaatatggttaataacattcaacctgtttattacaacttaaaaggaacttcagtgaatttgtttttattttttaacaagatttgtgaactgaatatcatgaaccatgttttgatacccctttttcacgttgtgccaacggaatagggtgtttgatatttcttcatatgttaaggagatgcttcaaaatgtcaattgctttaaacttaaattacctctcaagagaccaaggtacatttacctcattgtgtatataatgtttaatatttgtcagagcattctccaggtttgcagttttatttctataaagtatgggtattatgttgctcagttactcaaatggtactgtattgtttatatttgtaccccaaataacatcgtctgtactttctgttttctgtattgtatttgtgcaggattctttaggctttatcagtgtaatctctgccttttaagatatgtacagaaaatgtccatataaatttccattgaagtcgaatgatactgagaagcctgtaaagaggagaaaaaaacataagctgtgtttccccataagtttttttaaattgtatattgtatttgtagtaatattccaaaagaatgtaaataggaaatagaagagtgatgcttatgttaagtcctaacactacagtagaagaatggaagcagtgcaaataaattacatttttcccaagtgccagtggcatattttaaaataaagtgtatacgttggaatgagtcatgccatatgtagttgctgtagatggcaactagaacctttgagttacaagagtctttagaagttttctaaccctgcctagtgcaagttacaatattatagcgtgttcggggagtgccctcctgtctgcaggtgtgtctctgtgcctgggggcttttctccacatgcttaggggtgtgggtcttccattggggcatgatggacctgtctacaggtgatctctgttgcctttgggtcagcacatttgttagtctcctgggggtgaaaacttggcttacaagagaactggaaaaatgatgagatgtggtccccaaacccttgattgactctggggaggggctttgtgaataggattgctctcacattaaagatagttacttcaatttgaaggctggatttagggatttttttttttccttataacaaagacatcaccaggatatgaagcttttgttgaaagttggaaaaaaagtgaaattaaagacattcccagacaaa

SEQ ID NO: 68 - DNA, 931 bp, Homo sapiens
tttcgtcggcccgccccttggcttctgcactgatggtgggtggatgagtaatgcatccaggaagcctggaggcctgtggtttccgcacccgctgccacccccgcccctagcgtggacatttatcctctagcgctcaggccctgccgccatcgccgcagatccagcgcccagagagacaccagagaacccaccatggccccctttgagcccctggcttctggcatcctgttgttgctgtggctgatagcccccagcagggcctgcacctgtgtcccaccccacccacagacggccttctgcaattccgacctcgtcatcagggccaagttcgtggggacaccagaagtcaaccagaccaccttataccagcgttatgagatcaagatgaccaagatgtataaagggttccaagccttaggggatgccgctgacatccggttcgtctacacccccgccatggagagtgtctgcggatacttccacaggtcccacaaccgcagcgaggagtttctcattgctggaaaactgcaggatggactcttgcacatcactacctgcagttttgtggctccctggaacagcctgagcttagctcagcgccggggcttcaccaagacctacactgttggctgtgaggaatgcacagtgtttccctgtttatccatcccctgcaaactgcagagtggcactcattgcttgtggacggaccagctcctccaaggctctgaaaagggcttccagtcccgtcaccttgcctgcctgcctcgggagccagggctgtgcacctggcagtccctgcggtcccagatagcctgaatcctgcccggagtggaagctgaagcctgcacagtgtccaccctgttcccactcccatctttcttccggacaatgaaataaagagttaccacccagcagaaaaaaaaaaaaaaaa

SEQ ID NO: 69 - DNA, 3677 bp, Homo sapiens
tcgcggaggcttggggcagccgggtagctcggaggtcgtggcgctgggggctagcaccagcgctctgtcgggaggcgcagcggttaggtggaccggtcagcggactcaccggccagggcgctcggtgctggaatttgatattcattgatccgggttttatccctcttcttttttcttaaacatttttttttaaaactgtattgtttctcgttttaatttatttttgcttgccattccccacttgaatcgggccgacggcttggggagattgctctacttccccaaatcactgtggattttggaaaccagcagaaagaggaaagaggtagcaagagctccagagagaagtcgaggaagagagagacggggtcagagagagcgcgcgggcgtgcgagcagcgaaagcgacaggggcaaagtgagtgacctgcttttgggggtgaccgccggagcgcggcgtgagccctcccccttgggatcccgcagctgaccagtcgcgctgacggacagacagacagacaccgcccccagccccagctaccacctcctccccggccggcggcggacagtggacgcggcggcgagccgcgggcaggggccggagcccgcgcccggaggcggggtggagggggtcggggctcgcggcgtcgcactgaaacttttcgtccaacttctgggctgttctcgcttcggaggagccgtggtccgcgcgggggaagccgagccgagcggagccgcgagaagtgctagctcgggccgggaggagccgcagccggaggagggggaggaggaagaagagaaggaagaggagagggggccgcagtggcgactcggcgctcggaagccgggctcatggacgggtgaggcggcggtgtgcgcagacagtgctccagccgcgcgcgctccccaggccctggcccgggcctcgggccggggaggaagagtagctcgccgaggcgccgaggagagcgggccgccccacagcccgagccggagagggagcgcgagccgcgccggccccggtcgggcctccgaaaccatgaactttctgctgtcttgggtgcattggagccttgccttgctgctctacctccaccatgccaagtggtcccaggctgcacccatggcagaaggaggagggcagaatcatcacgaagtggtgaagttcatggatgtctatcagcgcagctactgccatccaatcgagaccctggtggacatcttccaggagtaccctgatgagatcgagtacatcttcaagccatcctgtgtgcccctgatgcgatgcgggggctgctgcaatgacgagggcctggagtgtgtgcccactgaggagtccaacatcaccatgcagattatgcggatcaaacctcaccaaggccagcacataggagagatgagcttcctacagcacaacaaatgtgaatgcagaccaaagaaagatagagcaagacaagaaaaaaaatcagttcgaggaaagggaaaggggcaaaaacgaaagcgcaagaaatcccggtataagtcctggagcgtgtacgttggtgcccgctgctgtctaatgccctggagcctccctggcccccatccctgtgggccttgctcagagcggagaaagcatttgtttgtacaagatccgcagacgtgtaaatgttcctgcaaaaacacagactcgcgttgcaaggcgaggcagcttgagttaaacgaacgtacttgcagatgtgacaagccgaggcggtgagccgggcaggaggaaggagcctccctcagggtttcgggaaccagatctctcaccaggaaagactgatacagaacgatcgatacagaaaccacgctgccgccaccacaccatcaccatcgacagaacagtccttaatccagaaacctgaaatgaaggaagaggagactctgcgcagagcactttgggtccggagggcgagactccggcggaagcattcccgggcgggtgacccagcacggtccctcttggaattggattcgccattttatttttcttgctgctaaatcaccgagcccggaagattagagagttttatttctgggattcctgtagacacacccacccacatacatacatttatatatatatatattatatatatataaaaataaatatctctattttatatatataaaatatatatattctttttttaaattaacagtgctaatgttattggtgtcttcactggatgtatttgactgctgtggacttgagttgggaggggaatgttcccactcagatcctgacagggaagaggaggagatgagagactctggcatgatcttttttttgtcccacttggtggggccagggtcctctcccctgcccaggaatgtgcaaggccagggcatgggggcaaatatgacccagttttgggaacaccgacaaacccagccctggcgctgagcctctctaccccaggtcagacggacagaaagacagatcacaggtacagggatgaggacaccggctctgaccaggagtttggggagcttcaggacattgctgtgctttggggattccctccacatgctgcacgcgcatctcgcccccaggggcactgcctggaagattcaggagcctgggcggccttcgcttactctcacctgcttctgagttgcccaggagaccactggcagatgtcccggcgaagagaagagacacattgttggaagaagcagcccatgacagctccccttcctgggactcgccctcatcctcttcctgctccccttcctggggtgcagcctaaaaggacctatgtcctcacaccattgaaaccactagttctgtccccccaggagacctggttgtgtgtgtgtgagtggttgaccttcctccatcccctggtccttcccttcccttcccgaggcacagagagacagggcaggatccacgtgcccattgtggaggcagagaaaagagaaagtgttttatatacggtacttatttaatatccctttttaattagaaattaaaacagttaatttaattaaagagtagggttttttttcagtattcttggttaatatttaatttcaactatttatgagatgtatcttttgctctctcttgctctcttatttgtaccggtttttgtatataaaattcatgtttccaatctctctctccctgatcggtgacagtcactagcttatcttgaacagatatttaattttgctaacactcagctctgccctccccgatcccctggctccccagcacacattcctttgaaataaggtttcaatatacatctacatactatatatatatttggcaacttgtatttgtgtgtatatatatatatatatgtttatgtatatatgtgattctgataaaatagacattgctattctgttttttatatgtaaaaacaaaacaagaaaaaatagagaattctacatactaaatctctctccttttttaattttaatatttgttatcatttatttattggtgctactgtttatccgtaataattgtggggaaaagatattaacatcacgtctttgtctctagtgcagtttttcgagatattccgtagtacatatttatttttaaacaacgacaaagaaatacagatatatcttaaaaaaaaaaaagcattttgtattaaagaatttaattctgatctcaaaaaaaaaaaaaaaaaa

SEQ ID NO: 70 - DNA, 2151 bp, Homo sapiens
gcctctccaaaggctgcagaagtttcttgctaacaaaaagtccgcacattcgagcaaagacaggctttagcgagttattaaaaacttaggggcgctcttgtcccccacagggcccgaccgcacacagcaaggcgatggcccagctgtaagttggtagcactgagaactagcagcgcgcgcggagcccgctgagacttgaatcaatctggtctaacggtttcccctaaaccgctaggagccctcaatcggcgggacagcagggcgcgtcctctgccactctcgctccgaggtccccgcgccagagacgcagccgcgctcccaccacccacacccaccgcgccctcgttcgcctcttctccgggagccagtccgcgccaccgccgccgcccaggccatcgccaccctccgcagccatgtccaccaggtccgtgtcctcgtcctcctaccgcaggatgttcggcggcccgggcaccgcgagccggccgagctccagccggagctacgtgactacgtccacccgcacctacagcctgggcagcgcgctgcgccccagcaccagccgcagcctctacgcctcgtccccgggcggcgtgtatgccacgcgctcctctgccgtgcgcctgcggagcagcgtgcccggggtgcggctcctgcaggactcggtggacttctcgctggccgacgccatcaacaccgagttcaagaacacccgcaccaacgagaaggtggagctgcaggagctgaatgaccgcttcgccaactacatcgacaaggtgcgcttcctggagcagcagaataagatcctgctggccgagctcgagcagctcaagggccaaggcaagtcgcgcctgggggacctctacgaggaggagatgcgggagctgcgccggcaggtggaccagctaaccaacgacaaagcccgcgtcgaggtggagcgcgacaacctggccgaggacatcatgcgcctccgggagaaattgcaggaggagatgcttcagagagaggaagccgaaaacaccctgcaatctttcagacaggatgttgacaatgcgtctctggcacgtcttgaccttgaacgcaaagtggaatctttgcaagaagagattgcctttttgaagaaactccacgaagaggaaatccaggagctgcaggctcagattcaggaacagcatgtccaaatcgatgtggatgtttccaagcctgacctcacggctgccctgcgtgacgtacgtcagcaatatgaaagtgtggctgccaagaacctgcaggaggcagaagaatggtacaaatccaagtttgctgacctctctgaggctgccaaccggaacaatgacgccctgcgccaggcaaagcaggagtccactgagtaccggagacaggtgcagtccctcacctgtgaagtggatgcccttaaaggaaccaatgagtccctggaacgccagatgcgtgaaatggaagagaactttgccgttgaagctgctaactaccaagacactattggccgcctgcaggatgagattcagaatatgaaggaggaaatggctcgtcaccttcgtgaataccaagacctgctcaatgttaagatggcccttgacattgagattgccacctacaggaagctgctggaaggcgaggagagcaggatttctctgcctcttccaaacttttcctccctgaacctgagggaaactaatctggattcactccctctggttgatacccactcaaaaaggacacttctgattaagacggttgaaactagagatggacaggttatcaacgaaacttctcagcatcacgatgaccttgaataaaaattgcacacactcagtgcagcaatatattaccagcaagaataaaaaagaaatccatatcttaaagaaacagctttcaagtgcctttctgcagtttttcaggagcgcaagatagatttggaataggaataagctctagttcttaacaaccgacactcctacaagatttagaaaaaagtttacaacataatctagtttacagaaaaatcttgtgctagaatactttttaaaaggtattttgaataccattaaaactgcttttttttttccagcaagtatccaaccaacttggttctgcttcaataaatctttggaaaaactcaaaaaaaaaaaaaaa

SEQ ID NO: 71 - DNA, 3207 bp, Homo sapiens; identical to SEQ ID NO: 53

SEQ ID NO: 72 - DNA, 6492 bp, Homo sapiens
tttctgtgaagcagaagtctgggaatcgatctggaaatcctcctaatttttactccctctccccgcgactcctgattcattgggaagtttcaaatcagctataactggagagtgctgaagattgatgggatcgttgccttatgcatttgttttggttttacaaaaaggaaacttgacagaggatcatgctgtacttaaaaaatacaacatcacagaggaagtagactgatattaacaatacttactaataataacgtgcctcatgaaataaagatccgaaaggaattggaataaaaatttcctgcatctcatgccaagggggaaacaccagaatcaagtgttccgcgtgattgaagacaccccctcgtccaagaatgcaaagcacatccaataaaatagctggattataactcctcttctttctctgggggccgtggggtgggagctggggcgagaggtgccgttggcccccgttgcttttcctctgggaaggatggcgcacgctgggagaacagggtacgataaccgggagatagtgatgaagtacatccattataagctgtcgcagaggggctacgagtgggatgcgggagatgtgggcgccgcgcccccgggggccgcccccgcaccgggcatcttctcctcccagcccgggcacacgccccatccagccgcatcccgggacccggtcgccaggacctcgccgctgcagaccccggctgcccccggcgccgccgcggggcctgcgctcagcccggtgccacctgtggtccacctgaccctccgccaggccggcgacgacttctcccgccgctaccgccgcgacttcgccgagatgtccagccagctgcacctgacgcccttcaccgcgcggggacgctttgccacggtggtggaggagctcttcagggacggggtgaactgggggaggattgtggccttctttgagttcggtggggtcatgtgtgtggagagcgtcaaccgggagatgtcgcccctggtggacaacatcgccctgtggatgactgagtacctgaaccggcacctgcacacctggatccaggataacggaggctgggatgcctttgtggaactgtacggccccagcatgcggcctctgtttgatttctcctggctgtctctgaagactctgctcagtttggccctggtgggagcttgcatcaccctgggtgcctatctgggccacaagtgaagtcaacatgcctgccccaaacaaatatgcaaaaggttcactaaagcagtagaaataatatgcattgtcagtgatgtaccatgaaacaaagctgcaggctgtttaagaaaaaataacacacatataaacatcacacacacagacagacacacacacacacaacaattaacagtcttcaggcaaaacgtcgaatcagctatttactgccaaagggaaatatcatttattttttacattattaagaaaaaaagatttatttatttaagacagtcccatcaaaactcctgtctttggaaatccgaccactaattgccaagcaccgcttcgtgtggctccacctggatgttctgtgcctgtaaacatagattcgctttccatgttgttggccggatcaccatctgaagagcagacggatggaaaaaggacctgatcattggggaagctggctttctggctgctggaggctggggagaaggtgttcattcacttgcatttctttgccctgggggctgtgatattaacagagggagggttcctgtggggggaagtccatgcctccctggcctgaagaagagactctttgcatatgactcacatgatgcatacctggtgggaggaaaagagttgggaacttcagatggacctagtacccactgagatttccacgccgaaggacagcgatgggaaaaatgcccttaaatcataggaaagtatttttttaagctaccaattgtgccgagaaaagcattttagcaatttatacaatatcatccagtaccttaagccctgattgtgtatattcatatattttggatacgcaccccccaactcccaatactggctctgtctgagtaagaaacagaatcctctggaacttgaggaagtgaacatttcggtgacttccgcatcaggaaggctagagttacccagagcatcaggccgccacaagtgcctgcttttaggagaccgaagtccgcagaacctgcctgtgtcccagcttggaggcctggtcctggaactgagccggggccctcactggcctcctccagggatgatcaacagggcagtgtggtctccgaatgtctggaagctgatggagctcagaattccactgtcaagaaagagcagtagaggggtgtggctgggcctgtcaccctggggccctccaggtaggcccgttttcacgtggagcatgggagccacgacccttcttaagacatgtatcactgtagagggaaggaacagaggccctgggcccttcctatcagaaggacatggtgaaggctgggaacgtgaggagaggcaatggccacggcccattttggctgtagcacatggcacgttggctgtgtggccttggcccacctgtgagtttaaagcaaggctttaaatgactttggagagggtcacaaatcctaaaagaagcattgaagtgaggtgtcatggattaattgacccctgtctatggaattacatgtaaaacattatcttgtcactgtagtttggttttatttgaaaacctgacaaaaaaaaagttccaggtgtggaatatgggggttatctgtacatcctggggcattaaaaaaaaaatcaatggtggggaactataaagaagtaacaaaagaagtgacatcttcagcaaataaactaggaaatttttttttcttccagtttagaatcagccttgaaacattgatggaataactctgtggcattattgcattatataccatttatctgtattaactttggaatgtactctgttcaatgtttaatgctgtggttgatatttcgaaagctgctttaaaaaaatacatgcatctcagcgtttttttgtttttaattgtatttagttatggcctatacactatttgtgagcaaaggtgatcgttttctgtttgagatttttatctcttgattcttcaaaagcattctgagaaggtgagataagccctgagtctcagctacctaagaaaaacctggatgtcactggccactgaggagctttgtttcaaccaagtcatgtgcatttccacgtcaacagaattgtttattgtgacagttatatctgttgtccctttgaccttgtttcttgaaggtttcctcgtccctgggcaattccgcatttaattcatggtattcaggattacatgcatgtttggttaaacccatgagattcattcagttaaaaatccagatggcaaatgaccagcagattcaaatctatggtggtttgacctttagagagttgctttacgtggcctgtttcaacacagacccacccagagccctcctgccctccttccgcgggggctttctcatggctgtccttcagggtcttcctgaaatgcagtggtgcttacgctccaccaagaaagcaggaaacctgtggtatgaagccagacctccccggcgggcctcagggaacagaatgatcagacctttgaatgattctaatttttaagcaaaatattattttatgaaaggtttacattgtcaaagtgatgaatatggaatatccaatcctgtgctgctatcctgccaaaatcattttaatggagtcagtttgcagtatgctccacgtggtaagatcctccaagctgctttagaagtaacaatgaagaacgtggacgtttttaatataaagcctgttttgtcttttgttgttgttcaaacgggattcacagagtatttgaaaaatgtatatatattaagaggtcacgggggctaattgctggctggctgccttttgctgtggggttttgttacctggttttaataacagtaaatgtgcccagcctcttggccccagaactgtacagtattgtggctgcacttgctctaagagtagttgatgttgcattttccttattgttaaaaacatgttagaagcaatgaatgtatataaaagcctcaactagtcatttttttctcctcttcttttttttcattatatctaattattttgcagttgggcaacagagaaccatccctattttgtattgaagagggattcacatctgcatcttaactgctctttatgaatgaaaaaacagtcctctgtatgtactcctctttacactggccagggtcagagttaaatagagtatatgcactttccaaattggggacaagggctctaaaaaaagccccaaaaggagaagaacatctgagaacctcctcggccctcccagtccctcgctgcacaaatactccgcaagagaggccagaatgacagctgacagggtctatggccatcgggtcgtctccgaagatttggcaggggcagaaaactctggcaggcttaagatttggaataaagtcacagaattaaggaagcacctcaatttagttcaaacaagacgccaacattctctccacagctcacttacctctctgtgttcagatgtggccttccatttatatgtgatctttgttttattagtaaatgcttatcatctaaagatgtagctctggcccagtgggaaaaattaggaagtgattataaatcgagaggagttataataatcaagattaaatgtaaataatcagggcaatcccaacacatgtctagctttcacctccaggatctattgagtgaacagaattgcaaatagtctctatttgtaattgaacttatcctaaaacaaatagtttataaatgtgaacttaaactctaattaattccaactgtacttttaaggcagtggctgtttttagactttcttatcacttatagttagtaatgtacacctactctatcagagaaaaacaggaaaggctcgaaatacaagccattctaaggaaattagggagtcagttgaaattctattctgatcttattctgtggtgtcttttgcagcccagacaaatgtggttacacactttttaagaaatacaattctacattgtcaagcttatgaaggttccaatcagatctttattgttattcaatttggatctttcagggattttttttttaaattattatgggacaaaggacatttgttggaggggtgggagggaggaagaatttttaaatgtaaaacattcccaagtttggatcagggagttggaagttttcagaataaccagaactaagggtatgaaggacctgtattggggtcgatgtgatgcctctgcgaagaaccttgtgtgacaaatgagaaacattttgaagtttgtggtacgacctttagattccagagacatcagcatggctcaaagtgcagctccgtttggcagtgcaatggtataaatttcaagctggatatgtctaatgggtatttaaacaataaatgtgcagttttaactaacaggatatttaatgacaaccttctggttggtagggacatctgtttctaaatgtttattatgtacaatacagaaaaaaattttataaaattaagcaatgtgaaactgaattggagagtgataatacaagtcctttagtcttacccagtgaatcattctgttccatgtctttggacaaccatgaccttggacaatcatgaaatatgcatctcactggatgcaaagaaaatcagatggagcatgaatggtactgtaccggttcatctggactgccccagaaaaataacttcaagcaaacatcctatcaacaacaaggttgttctgcataccaagctgagcacagaagatgggaacactggtggaggatggaaaggctcgctcaatcaagaaaattctgagactattaataaataagactgtagtgtagatactgagtaaatccatgcacctaaaccttttggaaaatctgccgtgggccctccagatagctcatttcattaagtttttccctccaaggtagaatttgcaagagtgacagtggattgcatttcttttggggaagctttcttttggtggttttgtttattataccttcttaagttttcaaccaaggtttgcttttgttttgagttactggggttatttttgttttaaataaaaataagtgtacaataagtgtttttgtattgaaagcttttgttatcaagattttcatacttttaccttccatggctctttttaagattgatacttttaagaggtggctgatattctgcaacactgtacacataaaaaatacggtaaggatactttacatggttaaggtaaagtaagtctccagttggccaccattagctataatggcactttgtttgtgttgttggaaaaagtcacattgccattaaactttccttgtctgtctagttaatattgtgaagaaaaataaagtacagtgtgagatactg

SEQ ID NO: 73 - DNA, 2575 bp, Homo sapiens
ggaggaggaagcaagcgagggggctggttcctgagcttcgcaattcctgtgtcgccttctgggctcccagcctgccgggtcgcatgatccctccggccggagctggtttttttgccagccaccgcgaggccggctgagttaccggcatccccgcagccacctcctctcccgacctgtgatacaaaagatcttccgggggctgcacctgcctgcctttgcctaaggcggatttgaatctctttctctcccttcagaatcttatcttggctttggatcttagaagagaatcactaaccagagacgagactcagtgagtgagcaggtgttttggacaatggactggttgagcccatccctattataaaaatgtctcagagcaaccgggagctggtggttgactttctctcctacaagctttcccagaaaggatacagctggagtcagtttagtgatgtggaagagaacaggactgaggccccagaagggactgaatcggagatggagacccccagtgccatcaatggcaacccatcctggcacctggcagacagccccgcggtgaatggagccactggccacagcagcagtttggatgcccgggaggtgatccccatggcagcagtaaagcaagcgctgagggaggcaggcgacgagtttgaactgcggtaccggcgggcattcagtgacctgacatcccagctccacatcaccccagggacagcatatcagagctttgaacaggtagtgaatgaactcttccgggatggggtaaactggggtcgcattgtggcctttttctccttcggcggggcactgtgcgtggaaagcgtagacaaggagatgcaggtattggtgagtcggatcgcagcttggatggccacttacctgaatgaccacctagagccttggatccaggagaacggcggctgggatacttttgtggaactctatgggaacaatgcagcagccgagagccgaaagggccaggaacgcttcaaccgctggttcctgacgggcatgactgtggccggcgtggttctgctgggctcactcttcagtcggaaatgaccagacactgaccatccactctaccctcccacccccttctctgctccaccacatcctccgtccagccgccattgccaccaggagaaccactacatgcagcccatgcccacctgcccatcacagggttgggcccagatctggtcccttgcagctagttttctagaatttatcacacttctgtgagacccccacacctcagttcccttggcctcagaattcacaaaatttccacaaaatctgtccaaaggaggctggcaggtatggaagggtttgtggctgggggcaggagggccctacctgattggtgcaacccttaccccttagcctccctgaaaatgtttttctgccagggagcttgaaagttttcagaacctcttccccagaaaggagactagattgcctttgttttgatgtttgtggcctcagaattgatcattttccccccactctccccacactaacctgggttccctttccttccatccctaccccctaagagccatttaggggccacttttgactagggattcaggctgcttgggataaagatgcaaggaccaggactccctcctcacctctggactggctagagtcctcactcccagtccaaatgtcctccagaagcctctggctagaggccagccccacccaggagggagggggctatagctacaggaagcaccccatgccaaagctagggtggcccttgcagttcagcaccaccctagtcccttcccctccctggctcccatgaccatactgagggaccaactgggcccaagacagatgccccagagctgtttatggcctcagctgcctcacttcctacaagagcagcctgtggcatctttgccttgggctgctcctcatggtgggttcaggggactcagccctgaggtgaaagggagctatcaggaacagctatgggagccccagggtcttccctacctcaggcaggaagggcaggaaggagagcctgctgcatggggtggggtagggctgactagaagggccagtcctgcctggccaggcagatctgtgccccatgcctgtccagcctgggcagccaggctgccaaggccagagtggcctggccaggagctcttcaggcctccctctctcttctgctccacccttggcctgtctcatccccaggggtcccagccaccccgggctctctgctgtacatatttgagactagtttttattccttgtgaagatgatatactatttttgttaagcgtgtctgtatttatgtgtgaggagctgctggcttgcagtgcgcgtgcacgtggagagctggtgcccggagattggacggcctgatgctccctcccctgccctggtccagggaagctggccgagggtcctggctcctgaggggcatctgcccctcccccaacccccaccccacacttgttccagctctttgaaatagtctgtgtgaaggtgaaagtgcagttcagtaataaactgtgtttactcagtgaaaaaaaaaaaaaaaaaa

SEQ ID NO: 74 - DNA, 6932 bp, Homo sapiens
gcatttaaaagacagcgtgagactcgcgccctccggcacggaaaaggccaggcgacaggtgtcgcttgaaaagactgggcttgtccttgctggtgcatgcgtcgtcggcctctgggcagcaggtttacaaaggaggaaaacgacttcttctagatttttttttcagtttcttctataaatcaaaacatctcaaaatggagacctaaaatccttaaagggacttagtctaatctcgggaggtagttttgtgcatgggtaaacaaattaagtattaactggtgttttactatccaaagaatgctaattttataaacatgatcgagttatataaggtataccataatgagtttgattttgaatttgatttgtggaaataaaggaaaagtgattctagctggggcatattgttaaagcatttttttcagagttggccaggcagtctcctactggcacattctcccattatgtagaatagaaatagtacctgtgtttgggaaagattttaaaatgagtgacagttatttggaacaaagagctaataatcaatccactgcaaattaaagaaacatgcagatgaaagttttgacacattaaaatacttctacagtgacaaagaaaaatcaagaacaaagctttttgatatgtgcaacaaatttagaggaagtaaaaagataaatgtgatgattggtcaagaaattatccagttatttacaaggccactgatattttaaacgtccaaaagtttgtttaaatgggctgttaccgctgagaatgatgaggatgagaatgatggttgaaggttacattttaggaaatgaagaaacttagaaaattaatataaagacagtgatgaatacaaagaagatttttataacaatgtgtaaaatttttggccagggaaaggaatattgaagttagatacaattacttacctttgagggaaataattgttggtaatgagatgtgatgtttctcctgccacctggaaacaaagcattgaagtctgcagttgaaaagcccaacgtctgtgagatccaggaaaccatgcttgcaaaccactggtaaaaaaaaaaaaaaaaaaaaaaaaaagccacagtgacttgcttattggtcattgctagtattatcgactcagaacctctttactaatggctagtaaatcataattgagaaattctgaattttgacaaggtctctgctgttgaaatggtaaatttattattttttttgtcatgataaattctggttcaaggtatgctatccatgaaataatttctgaccaaaactaaattgatgcaatttgattatccatcttagcctacagatggcatctggtaacttttgactgttttaaaaaataaatccactatcagagtagatttgatgttggcttcagaaacatttagaaaaacaaaagttcaaaaatgttttcaggaggtgataagttgaataactctacaatgttagttctttgagggggacaaaaaatttaaaatctttgaaaggtcttattttacagccatatctaaattatcttaagaaaatttttaacaaagggaatgaaatatatatcatgattctgtttttccaaaagtaacctgaatatagcaatgaagttcagttttgttattggtagtttgggcagagtctctttttgcagcacctgttgtctaccataattacagaggacatttccatgttctagccaagtatactattagaataaaaaaacttaacattgagttgcttcaacagcatgaaactgagtccaaaagaccaaatgaacaaacacattaatctctgattatttattttaaatagaatatttaattgtgtaagatctaatagtatcattatacttaagcaatcatattcctgatgatctatgggaaataactattatttaattaatattgaaaccaggttttaagatgtgttagccagtcctgttactagtaaatctctttatttggagagaaattttagattgttttgttctccttattagaaggattgtagaaagaaaaaaatgactaattggagaaaaattggggatatatcatatttcactgaattcaaaatgtcttcagttgtaaatcttaccattattttacgtacctctaagaaataaaagtgcttctaattaaaatatgatgtcattaattatgaaatacttcttgataacagaagttttaaaatagccatcttagaatcagtgaaatatggtaatgtattattttcctcctttgagttaggtcttgtgcttttttttcctggccactaaatttcacaatttccaaaaagcaaaataaacatattctgaatatttttgctgtgaaacacttgacagcagagctttccaccatgaaaagaagcttcatgagtcacacattacatctttgggttgattgaatgccactgaaacattctagtagcctggagaagttgacctacctgtggagatgcctgccattaaatggcatcctgatggcttaatacacatcactcttctgtgaagggttttaattttcaacacagcttactctgtagcatcatgtttacattgtatgtataaagattatacaaaggtgcaattgtgtatttcttccttaaaatgtatcagtataggatttagaatctccatgttgaaactctaaatgcatagaaataaaaataataaaaaatttttcattttggcttttcagcctagtattaaaactgataaaagcaaagccatgcacaaaactacctccctagagaaaggctagtcccttttcttccccattcatttcattatgaacatagtagaaaacagcatattcttatcaaatttgatgaaaagcgccaacacgtttgaactgaaatacgacttgtcatgtgaactgtaccgaatgtctacgtattccacttttcctgctggggttcctgtctcagaaaggagtcttgctcgtgctggtttctattacactggtgtgaatgacaaggtcaaatgcttctgttgtggcctgatgctggataactggaaaagaggagacagtcctactgaaaagcataaaaagttgtatcctagctgcagattcgttcagagtctaaattccgttaacaacttggaagctacctctcagcctacttttccttcttcagtaacaaattccacacactcattacttccgggtacagaaaacagtggatatttccgtggctcttattcaaactctccatcaaatcctgtaaactccagagcaaatcaagatttttctgccttgatgagaagttcctaccactgtgcaatgaataacgaaaatgccagattacttacttttcagacatggccattgacttttctgtcgccaacagatctggcaaaagcaggcttttactacataggacctggagacagagtggcttgctttgcctgtggtggaaaattgagcaattgggaaccgaaggataatgctatgtcagaacacctgagacattttcccaaatgcccatttatagaaaatcagcttcaagacacttcaagatacacagtttctaatctgagcatgcagacacatgcagcccgctttaaaacattctttaactggccctctagtgttctagttaatcctgagcagcttgcaagtgcgggtttttattatgtgggtaacagtgatgatgtcaaatgcttttgctgtgatggtggactcaggtgttgggaatctggagatgatccatgggttcaacatgccaagtggtttccaaggtgtgagtacttgataagaattaaaggacaggagttcatccgtcaagttcaagccagttaccctcatctacttgaacagctgctatccacatcagacagcccaggagatgaaaatgcagagtcatcaattatccattttgaacctggagaagaccattcagaagatgcaatcatgatgaatactcctgtgattaatgctgccgtggaaatgggctttagtagaagcctggtaaaacagacagttcagagaaaaatcctagcaactggagagaattatagactagtcaatgatcttgtgttagacttactcaatgcagaagatgaaataagggaagaggagagagaaagagcaactgaggaaaaagaatcaaatgatttattattaatccggaagaatagaatggcactttttcaacatttgacttgtgtaattccaatcctggatagtctactaactgccggaattattaatgaacaagaacatgatgttattaaacagaagacacagacgtctttacaagcaagagaactgattgatacgattttagtaaaaggaaatattgcagccactgtattcagaaactctctgcaagaagctgaagctgtgttatatgagcatttatttgtgcaacaggacataaaatatattcccacagaagatgtttcagatctaccagtggaagaacaattgcggagactacaagaagaaagaacatgtaaagtgtgtatggacaaagaagtgtccatagtgtttattccttgtggtcatctagtagtatgcaaagattgtgctccttctttaagaaagtgtcctatttgtaggagtacaatcaagggtacagttcgtacatttctttcatgaagaagaaccaaaacatcgtctaaactttagaattaatttattaaatgtattataactttaacttttatcctaatttggtttccttaaaatttttatttatttacaactcaaaaaacattgttttgtgtaacatatttatatatgtatctaaaccatatgaacatatattttttagaaactaagagaatgataggcttttgttcttatgaacgaaaaagaggtagcactacaaacacaatattcaatcaaaatttcagcattattgaaattgtaagtgaagtaaaacttaagatatttgagttaacctttaagaattttaaatattttggcattgtactaataccgggaacatgaagccaggtgtggtggtatgtgcctgtagtcccaggctgaggcaagagaattacttgagcccaggagtttgaatccatcctgggcagcatactgagaccctgcctttaaaaacaaacagaacaaaaacaaaacaccagggacacatttctctgtcttttttgatcagtgtcctatacatcgaaggtgtgcatatatgttgaatgacattttagggacatggtgtttttataaagaattctgtgagaaaaaatttaataaagcaacaaaaattactcttattcttcattgctttatttcaatgacattggatagtttagtcactcccagactctttccataccttcttaaagcctctcaaatattgaactacagtttatactccttcccataagatgcttcttcattgacacttgtagaacacggggtcaacacatcataaaatctattatggaatgcctgagacaagaatcaaacagtccctttagtaagtttgtttattcacttctctattgattcattcaagaagtctcatgccagccccacctattggaagaaggtctgagttttattcttatctctttggtattaattctgaaacttagaaagtacactggttagcaatgcttgggaccaacaggttgttctggtaaataaatctgtttcatattgtcagtgcaacaaaatgtccccctctgcattatgttattggtactcaacacgtccgagtcataactctgtcctttgcttcttatagaggtattaggtcttcaagagcagaagtaagactgtaatagggaatactcaggggaaggcaggcaaaggctagtcatctaaaccagttctagatgtctgtataggggcagatggctctgtaagggcagaagggaaagaccccttcataagggtcacagctgacaatcctataacaaaagacaggttaacaagagaaaaacttaacaaatttatttaatcacagatttacatcaccggggagccttcgtaatgaagatccaaaattacaggggaaactgtgcatttttatgcttaggtttgataatgaatggacagccctgaagaatagtgattggaaaaaaaggatatgatctaatgggaatagacacaggttggggacccagcaaggcctgtctgttcagattattcttggtctctgtgcagcattccttcctcctggatatagggcagggcctgtatgggatggggatattataacctgctatcaagcaaggtaggtcagagaatttatttatggccagctcttacatagttaggtgaggaaagattagagtactatctttaagatgtaagtctggcattgtggaaagatggttccagtttctatgacctaccttggggaagaggaattcaagtttctgtggcttgccttcagggagaatgaggctgagacaggagggcaggataacatcagagaaaaactttgcttctgaggccttcactttgggttttctgagccccaacatctgctagtgttgtaaagagaacaattagggaccaagtgaggggaggaaagaatccatctctgcattctgatgctgggagacttatttccttgaaatgcaattgattttgcctctgctaagaggctctgctggctacccatgtactagccagtgtcctgcatgggtgctaggctgaattatttgtaattgtgcttaggtgatttgtaactcaggtatagggtatttaaatagtaggcaccctttttgcaccatgtgtttttttttttatctagttcttgtatactacagataatatttgaactttgtcatctcactgtaaaacttttgttcatttctcattatggtaataaatagctattataaccaacccatttattcaaatatgttatttccctaagtgttattttgacattttgttttggaaaaaataaatcaccatagataataaaaaaaaaaaaaaaaaaaaaaa

SEQ ID NO: 75 - DNA, 760 bp, Homo sapiens; identical to SEQ ID NO: 3

SEQ ID NO: 76 - DNA, 813 bp, Homo sapiens
agctggtttcagacttcagaaggacacgggcagcagacagtggtcagtcctttcttggctctgctgacactcgagcccacattccgtcacctgctcagaatcatgcaggtctccactgctgcccttgctgtcctcctctgcaccatggctctctgcaaccagttctctgcatcacttgctgctgacacgccgaccgcctgctgcttcagctacacctcccggcagattccacagaatttcatagctgactactttgagacgagcagccagtgctccaagcccggtgtcatcttcctaaccaagcgaagccggcaggtctgtgctgaccccagtgaggagtgggtccagaaatatgtcagcgacctggagctgagtgcctgaggggtccagaagcttcgaggcccagcgacctcggtgggcccagtggggaggagcaggagcctgagccttgggaacatgcgtgtgacctccacagctacctcttctatggactggttgttgccaaacagccacactgtgggactcttcttaacttaaattttaatttatttatactatttagtttttgtaatttattttcgatttcacagtgtgtttgtgattgtttgctctgagagttcccctgtcccctcccccttccctcacaccgcgtctggtgacaaccgagtggctgtcatcagcctgtgtaggcagtcatggcaccaaagccaccagactgacaaatgtgtatcggatgcttttgttcagggctgtgatcggcctggggaaataataaagatgctcttttaaaaggtaaaaaaaaaaaaaaaaaaa

SEQ ID NO: 77 - DNA, 667 bp, Homo sapiens
agcacaggacacagctgggttctgaagcttctgagttctgcagcctcacctctgagaaaacctcttttccaccaataccatgaagctctgcgtgactgtcctgtctctcctcatgctagtagctgccttctgctctccagcgctctcagcaccaatgggctcagaccctcccaccgcctgctgcttttcttacaccgcgaggaagcttcctcgcaactttgtggtagattactatgagaccagcagcctctgctcccagccagctgtggtattccaaaccaaaagaagcaagcaagtctgtgctgatcccagtgaatcctgggtccaggagtacgtgtatgacctggaactgaactgagctgctcagagacaggaagtcttcagggaaggtcacctgagcccggatgcttctccatgagacacatctcctccatactcaggactcctctccgcagttcctgtcccttctcttaatttaatcttttttatgtgccgtgttattgtattaggtgtcatttccattatttatattagtttagccaaaggataagtgtcccctatggggatggtccactgtcactgtttctctgctgttgcaaatacatggataacacatttgattctgtgtgttttcataataaaactttaaaataaaatgcagacagtt

SEQ ID NO: 78 - DNA, 1237 bp, Homo sapiens
gctgcagaggattcctgcagaggatcaagacagcacgtggacctcgcacagcctctcccacaggtaccatgaaggtctccgcggcagccctcgctgtcatcctcattgctactgccctctgcgctcctgcatctgcctccccatattcctcggacaccacaccctgctgctttgcctacattgcccgcccactgccccgtgcccacatcaaggagtatttctacaccagtggcaagtgctccaacccagcagtcgtctttgtcacccgaaagaaccgccaagtgtgtgccaacccagagaagaaatgggttcgggagtacatcaactctttggagatgagctaggatggagagtccttgaacctgaacttacacaaatttgcctgtttctgcttgctcttgtcctagcttgggaggcttcccctcactatcctaccccacccgctccttgaagggcccagattctaccacacagcagcagttacaaaaaccttccccaggctggacgtggtggctcacgcctgtaatcccagcactttgggaggccaaggtgggtggatcacttgaggtcaggagttcgagaccagcctggccaacatgatgaaaccccatctctactaaaaatacaaaaaattagccgggcgtggtagcgggcgcctgtagtcccagctactcgggaggctgaggcaggagaatggcgtgaacccgggaggcggagcttgcagtgagccgagatcgcgccactgcactccagcctgggcgacagagcgagactccgtctcaaaaaaaaaaaaaaaaaaaaaaatacaaaaattagccgggcgtggtggcccacgcctgtaatcccagctactcgggaggctaaggcaggaaaattgtttgaacccaggaggtggaggctgcagtgagctgagattgtgccacttcactccagcctgggtgacaaagtgagactccgtcacaacaacaacaacaaaaagcttccccaactaaagcctagaagagcttctgaggcgctgctttgtcaaaaggaagtctctaggttctgagctctggctttgccttggctttgccagggctctgtgaccaggaaggaagtcagcatgcctctagaggcaaggaggggaggaacactgcactcttaagcttccgccgtctcaacccctcacaggagcttactggcaaacatgaaaaatcggcttaccattaaagttctcaatgcaaccataaaaaaaaaa

SEQ ID NO: 79 - DNA, 851 bp, Homo sapiens
agaatataacagcactcccaaagaactgggtactcaacactgagcagatctgttctttgagctaaaaaccatgtgctgtaccaagagtttgctcctggctgctttgatgtcagtgctgctactccacctctgcggcgaatcagaagcagcaagcaactttgactgctgtcttggatacacagaccgtattcttcatcctaaatttattgtgggcttcacacggcagctggccaatgaaggctgtgacatcaatgctatcatctttcacacaaagaaaaagttgtctgtgtgcgcaaatccaaaacagacttgggtgaaatatattgtgcgtctcctcagtaaaaaagtcaagaacatgtaaaaactgtggcttttctggaatggaattggacatagcccaagaacagaaagaaccttgctggggttggaggtttcacttgcacatcatggagggtttagtgcttatctaatttgtgcctcactggacttgtccaattaatgaagttgattcatattgcatcatagtttgctttgtttaagcatcacattaaagttaaactgtattttatgttatttatagctgtaggttttctgtgtttagctatttaatactaattttccataagctattttggtttagtgcaaagtataaaattatatttgggggggaataagattatatggactttcttgcaagcaacaagctattttttaaaaaaaactatttaacattcttttgtttatattgttttgtctcctaaattgttgtaattgcattataaaataagaaaaatattaataagacaaatattgaaaataaagaaacaaaaagttcttctgttaaaaaaaaa

SEQ ID NO: 80 - DNA, 2933 bp, Homo sapiens
gcagacacctgggctgagacatacaggacagagcatggatcgcctacagactgcactcctggttgtcctcgtcctccttgctgtggcgcttcaagcaactgaggcaggcccctacggcgccaacatggaagacagcgtctgctgccgtgattacgtccgttaccgtctgcccctgcgcgtggtgaaacacttctactggacctcagactcctgcccgaggcctggcgtggtgttgctaaccttcagggataaggagatctgtgccgatcccagagtgccctgggtgaagatgattctcaataagctgagccaatgaagagcctactctgatgaccgtggccttggctcctccaggaaggctcaggagccctacctccctgccattatagctgctccccgccagaagcctgtgccaactctctgcattccctgatctccatccctgtggctgtcacccttggtcacctccgtgctgtcactgccatctcccccctgacccctctaacccatcctctgcctccctccctgcagtcagagggtcctgttcccatcagcgattcccctgcttaaacccttccatgactccccactgccctaagctgaggtcagtctcccaagcctggcatgtggccctctggatctgggttccatctctgtctccagcctgcccacttcccttcatgaatgttgggttctagctccctgttctccaaacccatactacacatcccacttctgggtctttgcctgggatgttgctgacacccagaaagtcccaccacctgcacatgtgtagccccaccagccctccaaggcattgctcgcccaagcagctggtaattccatttcatgtattagatgtcccctggccctctgtcccctcttaataaccctagtcacagtctccgcagattcttgggatttgggggttttctcccccacctctccactagttggaccaaggtttctagctaagttactctagtctccaagcctctagcatagagcactgcagacaggccctggctcagaatcagagcccagaaagtggctgcagacaaaatcaataaaactaatgtccctcccctctccctgccaaaaggcagttacatatcaatacagagactcaaggtcactagaaatgggccagctgggtcaatgtgaagccccaaatttgcccagattcacctttcttcccccactccctttttttttttttttttgagatggagtttcgctcttgtcacccacgctggagtgcaatggtgtggtcttggcttattgaagcctctgcctcctgggttcaagtgattctcttgcctcagcctcctgagtagctgggattacaggttcctgctaccacgcccagctaatttttgtatttttagtagagacgaggcttcaccatgttggccaggctggtctcgaactcctgtcctcaggtaatccgcccacctcagcctcccaaagtgctgggattacaggcgtgagccacagtgcctggcctcttccctctccccaccccccccccaacttttttttttttttatggcagggtctcactctgtcgcccaggctggagtgcagtggcgtgatctcggctcactacaacctcgacctcctgggttcaagcgattctcccaccccagcctcccaagtagctgggattacaggtgtgtgccactacggctggctaatttttgtatttttagtagagacaggtttcaccatattggccaggctggtcttgaactcctgacctcaagtgatccaccttccttgtgctcccaaagtgctgagattacaggcgtgagctatcacacccagcctccccctttttttcctaataggagactcctgtacctttcttcgttttacctatgtgtcgtgtctgcttacatttccttctcccctcaggctttttttgggtggtcctccaacctccaatacccaggcctggcctcttcagagtaccccccattccactttccctgcctccttccttaaatagctgacaatcaaattcatgctatggtgtgaaagactacctttgacttggtattataagctggagttatatatgtatttgaaaacagagtaaatacttaagaggccaaatagatgaatggaagaattttaggaactgtgagagggggacaaggtggagctttcctggccctgggaggaagctggctgtggtagcgtagcgctctctctctctgtctgtggcaggaggcaaagagtagggtgtaattgagtgaaggaatcctgggtagagaccattctcaggtggttgggccaggctaaagactgggatttgggtctatctatgcctttctggctgatttttgtagagacggggttttgccatgttacccaggctggtctcaaactcctgggctcaagcgatcctcctggctcagcctcccaaagtgctgggattacaggcgtgagtcactgcgcctggcttcctcttcctcttgagaaatattcttttcatacagcaagtatgggacagcagtgtcccaggtaaaggacataaatgttacaagtgtctggtcctttctgagggaggctggtgccgctctgcagggtatttgaacctgtggaattggaggaggccatttcactccctgaacccagcctgacaaatcacagtgagaatgttcaccttataggcttgctgtggggctcaggttgaaagtgtggggagtgacactgcctaggcatccagctcagtgtcatccagggcctgtgtccctcccgaacccagggtcaacctgcctaccacaggcactagaaggacgaatctgcctactgcccatgaacggggccctcaagcgtcctgggatctccttctccctcctgtcctgtccttgcccctcaggactgctggaaaataaatcctttaaaatagtaaaaaaaaaaaaaaa

SEQ ID NO: 81 - DNA, 800 bp, Homo sapiens
acacagagagaaaggctaaagttctctggaggatgtggctgcagagcctgctgctcttgggcactgtggcctgcagcatctctgcacccgcccgctcgcccagccccagcacgcagccctgggagcatgtgaatgccatccaggaggcccggcgtctcctgaacctgagtagagacactgctgctgagatgaatgaaacagtagaagtcatctcagaaatgtttgacctccaggagccgacctgcctacagacccgcctggagctgtacaagcagggcctgcggggcagcctcaccaagctcaagggccccttgaccatgatggccagccactacaagcagcactgccctccaaccccggaaacttcctgtgcaacccagattatcacctttgaaagtttcaaagagaacctgaaggactttctgcttgtcatcccctttgactgctgggagccagtccaggagtgagaccggccagatgaggctggccaagccggggagctgctctctcatgaaacaagagctagaaactcaggatggtcatcttggagggaccaaggggtgggccacagccatggtgggagtggcctggacctgccctgggccacactgaccctgatacaggcatggcagaagaatgggaatattttatactgacagaaatcagtaatatttatatatttatatttttaaaatatttatttatttatttatttaagttcatattccatatttattcaagatgttttaccgtaataattattattaaaaatatgcttctacttgaaaaaaaaaaaaaaa

SEQ ID NO: 82 - DNA, 3338 bp, Homo sapiens
ataaaaagccacagatctctggcggcggcaaggggacagcactgagctctgccgcctggctctagccgcctgcctggcccccgccgggactcttgcccaccctcagccatggctccgatatctctgtcgtggctgctccgcttggccaccttctgccatctgactgtcctgctggctggacagcaccacggtgtgacgaaatgcaacatcacgtgcagcaagatgacatcaaagatacctgtagctttgctcatccactatcaacagaaccaggcatcatgcggcaaacgcgcaatcatcttggagacgagacagcacaggctgttctgtgccgacccgaaggagcaatgggtcaaggacgcgatgcagcatctggaccgccaggctgctgccctaactcgaaatggcggcaccttcgagaagcagatcggcgaggtgaagcccaggaccacccctgccgccgggggaatggacgagtctgtggtcctggagcccgaagccacaggcgaaagcagtagcctggagccgactccttcttcccaggaagcacagagggccctggggacctccccagagctgccgacgggcgtgactggttcctcagggaccaggctccccccgacgccaaaggctcaggatggagggcctgtgggcacggagcttttccgagtgcctcccgtctccactgccgccacgtggcagagttctgctccccaccaacctgggcccagcctctgggctgaggcaaagacctctgaggccccgtccacccaggacccctccacccaggcctccactgcgtcctccccagccccagaggagaatgctccgtctgaaggccagcgtgtgtggggtcagggacagagccccaggccagagaactctctggagcgggaggagatgggtcccgtgccagcgcacacggatgccttccaggactgggggcctggcagcatggcccacgtctctgtggtccctgtctcctcagaagggacccccagcagggagccagtggcttcaggcagctggacccctaaggctgaggaacccatccatgccaccatggacccccagaggctgggcgtccttatcactcctgtccctgacgcccaggctgccacccggaggcaggcggtggggctgctggccttccttggcctcctcttctgcctgggggtggccatgttcacctaccagagcctccagggctgccctcgaaagatggcaggagagatggcggagggccttcgctacatcccccggagctgtggtagtaattcatatgtcctggtgcccgtgtgaactcctctggcctgtgtctagttgtttgattcagacagctgcctgggatccctcatcctcatacccacccccacccaagggcctggcctgagctgggatgattggaggggggaggtgggatcctccaggtgcacaagctccaagctcccaggcattccccaggaggccagccttgaccattctccacctgccagggacagagggggtggcctcccaactcaccccagccccaaaactctcctctgctgctggctggttagaggttccctttgacgccatcccagccccaatgaacaattatttattaaatgcccagccccttctgacccatgctgccctgtgagtactacagtcctcccatctcacacatgagcatcaggccaggccctctgcccactccctgcaacctgattgtgtctcttggtcctgctgcagttgccagtcaccccggccacctgcggtgctatctcccccagccccatcctctgtacagagcccacgcccccactggtgacatgtcttttcttgcatgaggctagtgtggtgtttcctggcactgcttccagtgaggctctgcccttggttaggcattgtgggaaggggagataagggtatctggtgactttcctctttggtctacactgtgctgagtctgaaggctgggttctgatcctagttccaccatcaagccaccaacatactcccatctgtgaaaggaaagagggaggtaaggaatacctgtccccctgacaacactcattgacctgaggcccttctctccagcccctggatgcagcctcacagtccttaccagcagagcaccttagacagtccctgccaatggactaacttgtctttggaccctgaggcccagagggcctgcaagggagtgagttgatagcacagaccctgccctgtgggcccccaaatggaaatgggcagagcagagaccatccctgaaggccccgcccaggcttagtcactgagacagcccgggctctgcctcccatcacccgctaagagggagggagggctccagacacatgtccaagaagcccaggaaaggctccaggagcagccacattcctgatgcttcttcagagactcctgcaggcagccaggccacaagacccttgtggtcccaccccacacacgccagattctttcctgaggctgggctcccttcccacctctctcactccttgaaaacactgttctctgccctccaagaccttctccttcacctttgtccccaccgcagacaggaccagggatttccatgatgttttccatgagtcccctgtttgtttctgaaagggacgctacccgggaagggggctgggacatgggaaaggggaagttgtaggcataaagtcaggggttcccttttttggctgctgaaggctcgagcatgcctggatggggctgcaccggctggcctggcccctcagggtccctggtggcagctcacctctcccttggattgtccccgacccttgccgtctacctgaggggcctcttatgggctgggttctacccaggtgctaggaacactccttcacagatgggtgcttggaggaaggaaacccagctctggtccatagagagcaagacgctgtgctgccctgcccacctggcctctgcactcccctgctgggtgtggcgcagcatattcaggaagctcagggcctggctcaggtggggtcactctggcagctcagagagggtgggagtgggcccaatgcactttgttctggctcttccaggctgggagagccttccaggggtgggacaccctgtgatggggccctgcctcctttgtgaggaagccgctggggccagttggtcccccttccatggactttgttagtttctccaagcaggacatggacaaggatgatctaggaagactttggaaagagtaggaagactttggaaagacttttccaaccctcatcaccaacgtctgtgccattttgtattttactaataaaatttaaaagtcttgtgaatcaaaaaaaaaaaaaaaaaaaaaa

SEQ ID NO: 83 - DNA, 1184 bp, Homo sapiens
cacagagcccgggccgcaggcacctcctcgccagctcttccgctcctctcacagccgccagacccgcctgctgagccccatggcccgcgctgctctctccgccgcccccagcaatccccggctcctgcgagtggcactgctgctcctgctcctggtagccgctggccggcgcgcagcaggagcgtccgtggccactgaactgcgctgccagtgcttgcagaccctgcagggaattcaccccaagaacatccaaagtgtgaacgtgaagtcccccggaccccactgcgcccaaaccgaagtcatagccacactcaagaatgggcggaaagcttgcctcaatcctgcatcccccatagttaagaaaatcatcgaaaagatgctgaacagtgacaaatccaactgaccagaagggaggaggaagctcactggtggctgttcctgaaggaggccctgcccttataggaacagaagaggaaagagagacacagctgcagaggccacctggattgtgcctaatgtgtttgagcatcgcttaggagaagtcttctatttatttatttattcattagttttgaagattctatgttaatattttaggtgtaaaataattaagggtatgattaactctacctgcacactgtcctattatattcattctttttgaaatgtcaaccccaagttagttcaatctggattcatatttaatttgaaggtagaatgttttcaaatgttctccagtcattatgttaatatttctgaggagcctgcaacatgccagccactgtgatagaggctggcggatccaagcaaatggccaatgagatcattgtgaaggcaggggaatgtatgtgcacatctgttttgtaactgtttagatgaatgtcagttgttatttattgaaatgatttcacagtgtgtggtcaacatttctcatgttgaaactttaagaactaaaatgttctaaatatcccttggacattttatgtctttcttgtaaggcatactgccttgtttaatggtagttttacagtgtttctggcttagaacaaaggggcttaattattgatgttttcatagagaatataaaaataaagcacttatagaaaaaactcgtttgatttttggggggaaacaagggctacctttactggaaaatctggtgatttataaaaaaaaaaaaaaaa

SEQ ID NO: 84 - DNA, 1234 bp, Homo sapiens
gagctccgggaatttccctggcccgggactccgggctttccagccccaaccatgcataaaaggggttcgccgttctcggagagccacagagcccgggccacaggcagctccttgccagctctcctcctcgcacagccgctcgaaccgcctgctgagccccatggcccgcgccacgctctccgccgcccccagcaatccccggctcctgcgggtggcgctgctgctcctgctcctggtggccgccagccggcgcgcagcaggagcgcccctggccactgaactgcgctgccagtgcttgcagaccctgcagggaattcacctcaagaacatccaaagtgtgaaggtgaagtcccccggaccccactgcgcccaaaccgaagtcatagccacactcaagaatgggcagaaagcttgtctcaaccccgcatcgcccatggttaagaaaatcatcgaaaagatgctgaaaaatggcaaatccaactgaccagaaggaaggaggaagcttattggtggctgttcctgaaggaggccctgcccttacaggaacagaagaggaaagagagacacagctgcagaggccacctggattgcgcctaatgtgtttgagcatcacttaggagaagtcttctatttatttatttatttatttatttgtttgttttagaagattctatgttaatattttatgtgtaaaataaggttatgattgaatctacttgcacactctcccattatatttattgtttattttaggtcaaacccaagttagttcaatcctgattcatatttaatttgaagatagaaggtttgcagatattctctagtcatttgttaatatttcttcgtgatgacatatcacatgtcagccactgtgatagaggctgaggaatccaagaaaatggccagtgagatcaatgtgacggcagggaaatgtatgtgtgtctattttgtaactgtaaagatgaatgtcagttgttatttattgaaatgatttcacagtgtgtggtcaacatttctcatgttgaagctttaagaactaaaatgttctaaatatcccttggacattttatgtctttcttgtaaggcatactgccttgtttaatgttaattatgcagtgtttccctctgtgttagagcagagaggtttcgatatttattgatgttttcacaaagaacaggaaaataaaatatttaaaaatataaaaaaaaaaaaaaaaaaaaaaaaaaaaaaaaa

SEQ ID NO: 85 - DNA, 1166 bp, Homo sapiens
gctccgggaatttccctggcccggccgctccgggctttccagtctcaaccatgcataaaaagggttcgccgatcttggggagccacacagcccgggtcgcaggcacctccccgccagctctcccgcttctcgcacagcttcccgacgcgtctgctgagccccatggcccacgccacgctctccgccgcccccagcaatccccggctcctgcgggtggcgctgctgctcctgctcctggtggccgccagccggcgcgcagcaggagcgtccgtggtcactgaactgcgctgccagtgcttgcagacactgcagggaattcacctcaagaacatccaaagtgtgaatgtaaggtcccccggaccccactgcgcccaaaccgaagtcatagccacactcaagaatgggaagaaagcttgtctcaaccccgcatcccccatggttcagaaaatcatcgaaaagatactgaacaaggggagcaccaactgacaggagagaagtaagaagcttatcagcgtatcattgacacttcctgcagggtggtccctgcccttaccagagctgaaaatgaaaaagagaacagcagctttctagggacagctggaaaggacttaatgtgtttgactatttcttacgagggttctacttatttatgtatttatttttgaaagcttgtattttaatattttacatgctgttatttaaagatgtgagtgtgtttcatcaaacatagctcagtcctgattatttaattggaatatgatgggttttaaatgtgtcattaaactaatatttagtgggagaccataatgtgtcagccaccttgataaatgacagggtggggaactggagggtggggggattgaaatgcaagcaattagtggatcactgttagggtaagggaatgtatgtacacatctattttttatactttttttttaaaaaaagaatgtcagttgttatttattcaaattatctcacattatgtgttcaacatttttatgctgaagtttcccttagacattttatgtcttgcttgtagggcataatgccttgtttaatgtccattctgcagcgtttctctttcccttggaaaagagaatttatcattactgttacatttgtacaaatgacatgataataaaagttttatgaaaaaaaaaaaaaaa

SEQ ID NO: 86 - DNA, 1227 bp, Homo sapiens
ctttgcagataaatatggcacactagccccacgttttctgagacattcctcaattgcttagacatattctgagcctacagcagaggaacctccagtctcagcaccatgaatcaaactgccattctgatttgctgccttatctttctgactctaagtggcattcaaggagtacctctctctagaactgtacgctgtacctgcatcagcattagtaatcaacctgttaatccaaggtctttagaaaaacttgaaattattcctgcaagccaattttgtccacgtgttgagatcattgctacaatgaaaaagaagggtgagaagagatgtctgaatccagaatcgaaggccatcaagaatttactgaaagcagttagcaaggaaaggtctaaaagatctccttaaaaccagaggggagcaaaatcgatgcagtgcttccaaggatggaccacacagaggctgcctctcccatcacttccctacatggagtatatgtcaagccataattgttcttagtttgcagttacactaaaaggtgaccaatgatggtcaccaaatcagctgctactactcctgtaggaaggttaatgttcatcatcctaagctattcagtaataactctaccctggcactataatgtaagctctactgaggtgctatgttcttagtggatgttctgaccctgcttcaaatatttccctcacctttcccatcttccaagggtactaaggaatctttctgctttggggtttatcagaattctcagaatctcaaataactaaaaggtatgcaatcaaatctgctttttaaagaatgctctttacttcatggacttccactgccatcctcccaaggggcccaaattctttcagtggctacctacatacaattccaaacacatacaggaaggtagaaatatctgaaaatgtatgtgtaagtattcttatttaatgaaagactgtacaaagtagaagtcttagatgtatatatttcctatattgttttcagtgtacatggaataacatgtaattaagtactatgtatcaatgagtaacaggaaaattttaaaaatacagatagatatatgctctgcatgttacataagataaatgtgctgaatggttttcaaaataaaaatgaggtactctcctggaaatattaagaaagactatctaaatgttgaaagatcaaaaggttaataaagtaattataactaagaaaaaaaaaaaa

SEQ ID NO: 87 - DNA, 460 bp, Homo sapiens
gtggctgaattctaacctctgtaatgagcattgcacccaataccagttctgaactctacctggtgaccagggaccaggacctttataaggtggaaggcttgatgtcctccccagactcagctcctggtgaagctcccagccatcagccatgagggtcttgtatctcctcttctcgttcctcttcatattcctgatgcctcttccaggtgtttttggtggtataggcgatcctgttacctgccttaagagtggagccatatgtcatccagtcttttgccctagaaggtataaacaaattggcacctgtggtctccctggaacaaaatgctgcaaaaagccatgaggaggccaagaagctgctgtggctgatgcggattcagaaagggctccctcatcagagacgtgcgacatgtaaaccaaattaaactatggtgtccaaagatacgcaaaaaaaaaaaaa

SEQ ID NO: 88 - DNA, 1907 bp, Homo sapiens
agaatcagagagagagagatagagaaagagaaagacagaggtgtttcccttagctatggaaactctataagagagatccagcttgcctcctcttgagcagtcagcaacagggtcccgtccttgacacctcagcctctacaggactgagaagaagtaaaaccgtttgctggggctggcctgactcaccagctgccatgcagcagcccttcaattacccatatccccagatctactgggtggacagcagtgccagctctccctgggcccctccaggcacagttcttccctgtccaacctctgtgcccagaaggcctggtcaaaggaggccaccaccaccaccgccaccgccaccactaccacctccgccgccgccgccaccactgcctccactaccgctgccacccctgaagaagagagggaaccacagcacaggcctgtgtctccttgtgatgtttttcatggttctggttgccttggtaggattgggcctggggatgtttcagctcttccacctacagaaggagctggcagaactccgagagtctaccagccagatgcacacagcatcatctttggagaagcaaataggccaccccagtccaccccctgaaaaaaaggagctgaggaaagtggcccatttaacaggcaagtccaactcaaggtccatgcctctggaatgggaagacacctatggaattgtcctgctttctggagtgaagtataagaagggtggccttgtgatcaatgaaactgggctgtactttgtatattccaaagtatacttccggggtcaatcttgcaacaacctgcccctgagccacaaggtctacatgaggaactctaagtatccccaggatctggtgatgatggaggggaagatgatgagctactgcactactgggcagatgtgggcccgcagcagctacctgggggcagtgttcaatcttaccagtgctgatcatttatatgtcaacgtatctgagctctctctggtcaattttgaggaatctcagacgtttttcggcttatataagctctaagagaagcactttgggattctttccattatgattctttgttacaggcaccgagaatgttgtattcagtgagggtcttcttacatgcatttgaggtcaagtaagaagacatgaaccaagtggaccttgagaccacagggttcaaaatgtctgtagctcctcaactcacctaatgtttatgagccagacaaatggaggaatatgacggaagaacatagaactctgggctgccatgtgaagagggagaagcatgaaaaagcagctaccaggtgttctacactcatcttagtgcctgagagtatttaggcagattgaaaaggacaccttttaactcacctctcaaggtgggccttgctacctcaagggggactgtctttcagatacatggttgtgacctgaggatttaagggatggaaaaggaagactagaggcttgcataataagctaaagaggctgaaagaggccaatgccccactggcagcatcttcacttctaaatgcatatcctgagccatcggtgaaactaacagataagcaagagagatgttttggggactcatttcattcctaacacagcatgtgtatttccagtgcaattgtaggggtgtgtgtgtgtgtgtgtgtgtgtgtgtgtgtatgactaaagagagaatgtagatattgtgaagtacatattaggaaaatatgggttgcatttggtcaagattttgaatgcttcctgacaatcaactctaatagtgcttaaaaatcattgattgtcagctactaatgatgttttcctataatataataaatatttatgtagatgtgcatttttgtgaaatgaaaacatgtaataaaaagtatatgttaggatacaaaaaaaaaaaaa

SEQ ID NO: 89 - DNA, 3823 bp, Homo sapiens
ataaaacctggagcgcaggatcgcgcccaggagcggcgagctagcggacgcaaagactgggcatgctccgcggcggcgcaggttttggtcacaagtaggaagaagccagtgcaccagaccggcaaagagaagcgggagccgccgcggcagcgcggccgtggggtccgccgccgccgcatcggagcgggaggaggagcagcggggagggcgaggccgccgggccgagagccgtcccgcctgctctcggtcttctgccttcgcctccgcgcggtgcgtcggacccagggtctgtcacctgggcgccaggggccgccgccggggagccggagcgggcaggaccctccctccgccgactgcggcccgagagcgcccccgcggggtggagcggcagccgccttctgcgggcggctgagtgtccgtctcgcgcccggagcgggcgaccgccgtcagcccggaggaggaggaggaggaggagggggcggccatggggctgctgtcccagggctcgccgctgagctgggaggaaaccaagcgccatgccgaccacgtgcggcggcacgggatcctccagttcctgcacatctaccacgccgtcaaggaccggcacaaggacgttctcaagtggggcgatgaggtggaatacatgttggtatcttttgatcatgaaaataaaaaagtccggttggtcctgtctggggagaaagttcttgaaactctgcaagagaagggggaaaggacaaacccaaaccatcctaccctttggagaccagagtatgggagttacatgattgaagggacaccaggacagccctacggaggaacaatgtccgagttcaatacagttgaggccaacatgcgaaaacgccggaaggaggctacttctatattagaagaaaatcaggctctttgcacaataacttcatttcccagattaggctgtcctgggttcacactgcccgaggtcaaacccaacccagtggaaggaggagcttccaagtccctcttctttccagatgaagcaataaacaagcaccctcgcttcagtaccttaacaagaaatatccgacataggagaggagaaaaggttgtcatcaatgtaccaatatttaaggacaagaatacaccatctccatttatagaaacatttactgaggatgatgaagcttcaagggcttctaagccggatcatatttacatggatgccatgggatttggaatgggcaattgctgtctccaggtgacattccaagcctgcagtatatctgaggccagatacctttatgatcagttggctactatctgtccaattgttatggctttgagtgctgcatctcccttttaccgaggctatgtgtcagacattgattgtcgctggggagtgatttctgcatctgtagatgatagaactcgggaggagcgaggactggagccattgaagaacaataactataggatcagtaaatcccgatatgactcaatagacagctatttatctaagtgtggtgagaaatataatgacatcgacttgacgatagataaagagatctacgaacagctgttgcaggaaggcattgatcatctcctggcccagcatgttgctcatctctttattagagacccactgacactgtttgaagagaaaatacacctggatgatgctaatgagtctgaccattttgagaatattcagtccacaaattggcagacaatgagatttaagccccctcctccaaactcagacattggatggagagtagaatttcgacccatggaggtgcaattaacagactttgagaactctgcctatgtggtgtttgtggtactgctcaccagagtgatcctttcctacaaattggattttctcattccactgtcaaaggttgatgagaacatgaaggtagcacagaaaagagatgctgtcttgcagggaatgttttatttcaggaaagatatttgcaaaggtggcaatgcagtggtggatggttgtggcaaggcccagaacagcacggagctcgctgcagaggagtacaccctcatgagcatagacaccatcatcaatgggaaggaaggtgtgtttcctggactgatcccaattctgaactcttaccttgaaaacatggaagtggatgtggacaccagatgtagtattctgaactacctaaagctaattaagaagagagcatctggagaactaatgacagttgccagatggatgagggagtttatcgcaaaccatcctgactacaagcaagacagtgtcataactgatgaaatgaattatagccttattttgaagtgtaaccaaattgcaaatgaattatgtgaatgcccagagttacttggatcagcatttaggaaagtaaaatatagtggaagtaaaactgactcatccaactagacattctacagaaagaaaaatgcattattgacgaactggctacagtaccatgcctctcagccagcccgtgtgtataatatgaagaccaaatgatagaactgtactgttttctgggccagtgagccagaaattgattaaggctttctttggtaggtaaatctagagtttatacagtgtacatgtacatagtaaagtatttttgattaacaatgtattttaataacatatctaaagtcatcatgaactggcttgtacatttttaaattcttactctggagcaacctactgtctaagcagttttgtaaatgtactggtaattgtacaatacttgcattccagagttaaaatgtttactgtaaatttttgttcttttaaagactacctgggacctgatttattgaaatttttctctttaaaaacattttctctcgttaattttcctttgtcatttcctttgttgtctacattaaatcacttgaatccattgaaagtgcttcaagggtaatcttgggtttctagcaccttatctatgatgtttcttttgcaattggaataatcacttggtcaccttgccccaagctttcccctctgaataaatacccattgaactctgatggctgttatcaaaggaacttttctttgtttaaatttgctgatgcaggaattaagtttaaacacaactctatagaaagaaaggagattattacccagaattcacatgtagtgattattaaggacaatttttttttttaactaaaaaagttggcggcaggggtggggggtggcaatcatttttcttcctatacatacaaaggatattgtcaaaaatggcgttcttctcttgtggcctgttattctgattgctgctgtatacagttttgtcactctttagtttttagttaagcatactgatagactttcctctaaaagccattcactccagattttacctggggaatattctacatactgcttactttctctataaaactcatcaataaatcatgaaaggcactgagttttgtaaatcaggaccctaaatgtttaattgtaaataagtttcagataattattatagctttgcgttgaagtttgttgttttttttctcaactagttaagtcaactgcttctgaaataactctgtattgtagattatgcagatctttacaggcataaatatttaaactgtaatatgctaacttgaagagattgcaataaagctgcttcagctaaccctgtttatgtttaaatactagggtttgttctatattttatacatgcattttggatgattaaagaatgcctggttttcgtttgcaatttgcttgtgtaaatcaggttgtaaaaaggcagataaattgaaatgtttgtggtatgaggaaataaaagaatggaattagctttcattcagaaaaaaaaaaaaa

SEQ ID NO: 90 - DNA, 3249 bp, Homo sapiens
caagcttagcctggccgggaaacgggaggcgtggaggccgggagcagcccccggggtcatcgccctgccaccgccgcccgattgctttagcttggaaattccggagctgaagcggccagcgagggaggatgaccctctcggcccgggcaccctgtcagtccggaaataactgcagcatttgttccggaggggaaggcgcgaggtttccgggaaagcagcaccgccccttggcccccaggtggctagcgctataaaggatcacgcgccccagtcgacgctgagctcctctgctactcagagttgcaacctcagcctcgctatggctcccagcagcccccggcccgcgctgcccgcactcctggtcctgctcggggctctgttcccaggacctggcaatgcccagacatctgtgtccccctcaaaagtcatcctgccccggggaggctccgtgctggtgacatgcagcacctcctgtgaccagcccaagttgttgggcatagagaccccgttgcctaaaaaggagttgctcctgcctgggaacaaccggaaggtgtatgaactgagcaatgtgcaagaagatagccaaccaatgtgctattcaaactgccctgatgggcagtcaacagctaaaaccttcctcaccgtgtactggactccagaacgggtggaactggcacccctcccctcttggcagccagtgggcaagaaccttaccctacgctgccaggtggagggtggggcaccccgggccaacctcaccgtggtgctgctccgtggggagaaggagctgaaacgggagccagctgtgggggagcccgctgaggtcacgaccacggtgctggtgaggagagatcaccatggagccaatttctcgtgccgcactgaactggacctgcggccccaagggctggagctgtttgagaacacctcggccccctaccagctccagacctttgtcctgccagcgactcccccacaacttgtcagcccccgggtcctagaggtggacacgcaggggaccgtggtctgttccctggacgggctgttcccagtctcggaggcccaggtccacctggcactgggggaccagaggttgaaccccacagtcacctatggcaacgactccttctcggccaaggcctcagtcagtgtgaccgcagaggacgagggcacccagcggctgacgtgtgcagtaatactggggaaccagagccaggagacactgcagacagtgaccatctacagctttccggcgcccaacgtgattctgacgaagccagaggtctcagaagggaccgaggtgacagtgaagtgtgaggcccaccctagagccaaggtgacgctgaatggggttccagcccagccactgggcccgagggcccagctcctgctgaaggccaccccagaggacaacgggcgcagcttctcctgctctgcaaccctggaggtggccggccagcttatacacaagaaccagacccgggagcttcgtgtcctgtatggcccccgactggacgagagggattgtccgggaaactggacgtggccagaaaattcccagcagactccaatgtgccaggcttgggggaacccattgcccgagctcaagtgtctaaaggatggcactttcccactgcccatcggggaatcagtgactgtcactcgagatcttgagggcacctacctctgtcgggccaggagcactcaaggggaggtcacccgcaaggtgaccgtgaatgtgctctccccccggtatgagattgtcatcatcactgtggtagcagccgcagtcataatgggcactgcaggcctcagcacgtacctctataaccgccagcggaagatcaagaaatacagactacaacaggcccaaaaagggacccccatgaaaccgaacacacaagccacgcctccctgaacctatcccgggacagggcctcttcctcggccttcccatattggtggcagtggtgccacactgaacagagtggaagacatatgccatgcagctacacctaccggccctgggacgccggaggacagggcattgtcctcagtcagatacaacagcatttggggccatggtacctgcacacctaaaacactaggccacgcatctgatctgtagtcacatgactaagccaagaggaaggagcaagactcaagacatgattgatggatgttaaagtctagcctgatgagaggggaagtggtgggggagacatagccccaccatgaggacatacaactgggaaatactgaaacttgctgcctattgggtatgctgaggccccacagacttacagaagaagtggccctccatagacatgtgtagcatcaaaacacaaaggcccacacttcctgacggatgccagcttgggcactgctgtctactgaccccaacccttgatgatatgtatttattcatttgttattttaccagctatttattgagtgtcttttatgtaggctaaatgaacataggtctctggcctcacggagctcccagtcctaatcacattcaaggtcaccaggtacagttgtacaggttgtacactgcaggagagtgcctggcaaaaagatcaaatggggctgggacttctcattggccaacctgcctttccccagaaggagtgatttttctatcggcacaaaagcactatatggactggtaatggttacaggttcagagattacccagtgaggccttattcctcccttccccccaaaactgacacctttgttagccacctccccacccacatacatttctgccagtgttcacaatgacactcagcggtcatgtctggacatgagtgcccagggaatatgcccaagctatgccttgtcctcttgtcctgtttgcatttcactgggagcttgcactatgcagctccagtttcctgcagtgatcagggtcctgcaagcagtggggaagggggccaaggtattggaggactccctcccagctttggaagcctcatccgcgtgtgtgtgtgtgtgtatgtgtagacaagctctcgctctgtcacccaggctggagtgcagtggtgcaatcatggttcactgcagtcttgaccttttgggctcaagtgatcctcccacctcagcctcctgagtagctgggaccataggctcacaacaccacacctggcaaatttgattttttttttttttccagagacggggtctcgcaacattgcccagacttcctttgtgttagttaataaagctttctcaactgccaaa

SEQ ID NO: 91 - DNA, 1254 bp, Homo sapiens
ctcacttggccttacactccgctcggctcaccatgtgtcactctcgcagctgccacccgaccatgaccatcctgcaggccccgaccccggccccctccaccatcccgggaccccggcggggctccggtcctgagatcttcaccttcgaccctctcccggagcccgcagcggcccctgccgggcgccccagcgcctctcgcgggcaccgaaagcgcagccgcagggttctctaccctcgagtggtccggcgccagctgccagtcgaggaaccgaacccagccaaaaggcttctctttctgctgctcaccatcgtcttctgccagatcctgatggctgaagagggtgtgccggcgcccctgcctccagaggacgcccctaacgccgcatccctggcgcccacccctgtgtccgccgtcctcgagccctttaatctgacttcggagccctcggactacgctctggacctcagcactttcctccagcaacacccggccgccttctaactgtgactccccgcactccccaaaaagaatccgaaaaaccacaaagaaacaccaggcgtacctggtgcgcgagagcgtatccccaactgggacttccgaggcaacttgaactcagaacactacagcggagacgccacccggtgcttgaggcgggaccgaggcgcacagagaccgaggcgcatagagaccgaggcacagcccagctggggctaggcccggtgggaaggagagcgtcgttaatttatttcttattgctcctaattaatatttatatgtatttatgtacgtcctcctaggtgatggagatgtgtacgtaatatttattttaacttatgcaagggtgtgagatgttccccctgctgtaaatgcaggtctcttggtatttattgagctttgtgggactggtggaagcaggacacctggaactgcggcaaagtaggagaagaaatggggaggactcgggtgggggaggacgtcccggctgggatgaagtctggtggtgggtcgtaagtttaggaggtgactgcatcctccagcatctcaactccgtctgtctactgtgtgagacttcggcggaccattaggaatgagatccgtgagatccttccatcttcttgaagtcgcctttagggtggctgcgaggtagagggttgggggttggtgggctgtcacggagcgactgtcgagatcgcctagtatgttctgtgaacacaaataaaattgatttactgtctgcaaaaaaaaaaaaaaa

SEQ ID NO: 92 - DNA, 840 bp, Homo sapiens
acattctaactgcaacctttcgaagcctttgctctggcacaacaggtagtaggcgacactgttcgtgttgtcaacatgaccaacaagtgtctcctccaaattgctctcctgttgtgcttctccactacagctctttccatgagctacaacttgcttggattcctacaaagaagcagcaattttcagtgtcagaagctcctgtggcaattgaatgggaggcttgaatactgcctcaaggacaggatgaactttgacatccctgaggagattaagcagctgcagcagttccagaaggaggacgccgcattgaccatctatgagatgctccagaacatctttgctattttcagacaagattcatctagcactggctggaatgagactattgttgagaacctcctggctaatgtctatcatcagataaaccatctgaagacagtcctggaagaaaaactggagaaagaagatttcaccaggggaaaactcatgagcagtctgcacctgaaaagatattatgggaggattctgcattacctgaaggccaaggagtacagtcactgtgcctggaccatagtcagagtggaaatcctaaggaacttttacttcattaacagacttacaggttacctccgaaactgaagatctcctagcctgtgcctctgggactggacaattgcttcaagcattcttcaaccagcagatgctgtttaagtgactgatggctaatgtactgcatatgaaaggacactagaagattttgaaatttttattaaattatgagttatttttatttatttaaattttattttggaaaataaattatttttggtgcaaaagtca

SEQ ID NO: 93 - DNA, 2347 bp, Homo sapiens
ctgtttcagggccattggactctccgtcctgcccagagcaagatgtgtcaccagcagttggtcatctcttggttttccctggtttttctggcatctcccctcgtggccatatgggaactgaagaaagatgtttatgtcgtagaattggattggtatccggatgcccctggagaaatggtggtcctcacctgtgacacccctgaagaagatggtatcacctggaccttggaccagagcagtgaggtcttaggctctggcaaaaccctgaccatccaagtcaaagagtttggagatgctggccagtacacctgtcacaaaggaggcgaggttctaagccattcgctcctgctgcttcacaaaaaggaagatggaatttggtccactgatattttaaaggaccagaaagaacccaaaaataagacctttctaagatgcgaggccaagaattattctggacgtttcacctgctggtggctgacgacaatcagtactgatttgacattcagtgtcaaaagcagcagaggctcttctgacccccaaggggtgacgtgcggagctgctacactctctgcagagagagtcagaggggacaacaaggagtatgagtactcagtggagtgccaggaggacagtgcctgcccagctgctgaggagagtctgcccattgaggtcatggtggatgccgttcacaagctcaagtatgaaaactacaccagcagcttcttcatcagggacatcatcaaacctgacccacccaagaacttgcagctgaagccattaaagaattctcggcaggtggaggtcagctgggagtaccctgacacctggagtactccacattcctacttctccctgacattctgcgttcaggtccagggcaagagcaagagagaaaagaaagatagagtcttcacggacaagacctcagccacggtcatctgccgcaaaaatgccagcattagcgtgcgggcccaggaccgctactatagctcatcttggagcgaatgggcatctgtgccctgcagttaggttctgatccaggatgaaaatttggaggaaaagtggaagatattaagcaaaatgtttaaagacacaacggaatagacccaaaaagataatttctatctgatttgctttaaaacgtttttttaggatcacaatgatatctttgctgtatttgtatagttagatgctaaatgctcattgaaacaatcagctaatttatgtatagattttccagctctcaagttgccatgggccttcatgctatttaaatatttaagtaatttatgtatttattagtatattactgttatttaacgtttgtctgccaggatgtatggaatgtttcatactcttatgacctgatccatcaggatcagtccctattatgcaaaatgtgaatttaattttatttgtactgacaacttttcaagcaaggctgcaagtacatcagttttatgacaatcaggaagaatgcagtgttctgataccagtgccatcatacacttgtgatggatgggaacgcaagagatacttacatggaaacctgacaatgcaaacctgttgagaagatccaggagaacaagatgctagttcccatgtctgtgaagacttcctggagatggtgttgataaagcaatttagggccacttacacttctaagcaagtttaatctttggatgcctgaattttaaaagggctagaaaaaaatgattgaccagcctgggaaacataacaagaccccgtctctacaaaaaaaatttaaaattagccaggcgtggtggctcatgcttgtggtcccagctgttcaggaggatgaggcaggaggatctcttgagcccaggaggtcaaggctatggtgagccgtgattgtgccactgcataccagcctaggtgacagaatgagaccctgtctcaaaaaaaaaaatgattgaaattaaaattcagctttagcttccatggcagtcctcacccccacctctctaaaagacacaggaggatgacacagaaacaccgtaagtgtctggaaggcaaaaagatcttaagattcaagagagaggacaagtagttatggctaaggacatgaaattgtcagaatggcaggtggcttcttaacagccctgtgagaagcagacagatgcaaagaaaatctggaatccctttctcattagcatgaatgaacctgatacacaattatgaccagaaaatatggctccatgaaggtgctacttttaagtaatgtatgtgcgctctgtaaagtgattacatttgtttcctgtttgtttatttatttatttatttttgcattctgaggctgaactaataaaaactcttctttgtaatc

SEQ ID NO: 94 - DNA, 1498 bp, Homo sapiens
accaaacctcttcgaggcacaaggcacaacaggctgctctgggattctcttcagccaatcttcattgctcaagtgtctgaagcagccatggcagaagtacctgagctcgccagtgaaatgatggcttattacagtggcaatgaggatgacttgttctttgaagctgatggccctaaacagatgaagtgctccttccaggacctggacctctgccctctggatggcggcatccagctacgaatctccgaccaccactacagcaagggcttcaggcaggccgcgtcagttgttgtggccatggacaagctgaggaagatgctggttccctgcccacagaccttccaggagaatgacctgagcaccttctttcccttcatctttgaagaagaacctatcttcttcgacacatgggataacgaggcttatgtgcacgatgcacctgtacgatcactgaactgcacgctccgggactcacagcaaaaaagcttggtgatgtctggtccatatgaactgaaagctctccacctccagggacaggatatggagcaacaagtggtgttctccatgtcctttgtacaaggagaagaaagtaatgacaaaatacctgtggccttgggcctcaaggaaaagaatctgtacctgtcctgcgtgttgaaagatgataagcccactctacagctggagagtgtagatcccaaaaattacccaaagaagaagatggaaaagcgatttgtcttcaacaagatagaaatcaataacaagctggaatttgagtctgcccagttccccaactggtacatcagcacctctcaagcagaaaacatgcccgtcttcctgggagggaccaaaggcggccaggatataactgacttcaccatgcaatttgtgtcttcctaaagagagctgtacccagagagtcctgtgctgaatgtggactcaatccctagggctggcagaaagggaacagaaaggtttttgagtacggctatagcctggactttcctgttgtctacaccaatgcccaactgcctgccttagggtagtgctaagaggatctcctgtccatcagccaggacagtcagctctctcctttcagggccaatccccagcccttttgttgagccaggcctctctcacctctcctactcacttaaagcccgcctgacagaaaccacggccacatttggttctaagaaaccctctgtcattcgctcccacattctgatgagcaaccgcttccctatttatttatttatttgtttgtttgttttattcattggtctaatttattcaaagggggcaagaagtagcagtgtctgtaaaagagcctagtttttaatagctatggaatcaattcaatttggactggtgtgctctctttaaatcaagtcctttaattaagactgaaaatatataagctcagattatttaaatgggaatatttataaatgagcaaatatcatactgttcaatggttctgaaataaacttcactgaag

SEQ ID NO: 95 - DNA, 822 bp, Homo sapiens
agttccctatcactctctttaatcactactcacagtaacctcaactcctgccacaatgtacaggatgcaactcctgtcttgcattgcactaagtcttgcacttgtcacaaacagtgcacctacttcaagttctacaaagaaaacacagctacaactggagcatttactgctggatttacagatgattttgaatggaattaataattacaagaatcccaaactcaccaggatgctcacatttaagttttacatgcccaagaaggccacagaactgaaacatcttcagtgtctagaagaagaactcaaacctctggaggaagtgctaaatttagctcaaagcaaaaactttcacttaagacccagggacttaatcagcaatatcaacgtaatagttctggaactaaagggatctgaaacaacattcatgtgtgaatatgctgatgagacagcaaccattgtagaatttctgaacagatggattaccttttgtcaaagcatcatctcaacactgacttgataattaagtgcttcccacttaaaacatatcaggccttctatttatttaaatatttaaattttatatttattgttgaatgtatggtttgctacctattgtaactattattcttaatcttaaaactataaatatggatcttttatgattctttttgtaagccctaggggctctaaaatggtttcacttatttatcccaaaatatttattattatgttgaatgttaaatatagtatctatgtagattggttagtaaaactatttaataaatttgataaatataaaaaaaaaaaaaaaaaaaaaaaaaa

SEQ ID NO: 96 - DNA, 1049 bp, Homo sapiens
aaaacaacaggaagcagcttacaaactcggtgaacaactgagggaaccaaaccagagacgcgctgaacagagagaatcaggctcaaagcaagtggaagtgggcagagattccaccaggactggtgcaaggcgcagagccagccagatttgagaagaaggcaaaaagatgctggggagcagagctgtaatgctgctgttgctgctgccctggacagctcagggcagagctgtgcctgggggcagcagccctgcctggactcagtgccagcagctttcacagaagctctgcacactggcctggagtgcacatccactagtgggacacatggatctaagagaagagggagatgaagagactacaaatgatgttccccatatccagtgtggagatggctgtgacccccaaggactcagggacaacagtcagttctgcttgcaaaggatccaccagggtctgattttttatgagaagctgctaggatcggatattttcacaggggagccttctctgctccctgatagccctgtgggccagcttcatgcctccctactgggcctcagccaactcctgcagcctgagggtcaccactgggagactcagcagattccaagcctcagtcccagccagccatggcagcgtctccttctccgcttcaaaatccttcgcagcctccaggcctttgtggctgtagccgcccgggtctttgcccatggagcagcaaccctgagtccctaaaggcagcagctcaaggatggcactcagatctccatggcccagcaaggccaagataaatctaccaccccaggcacctgtgagccaacaggttaattagtccattaattttagtgggacctgcatatgttgaaaattaccaatactgactgacatgtgatgctgacctatgataaggttgagtatttattagatgggaagggaaatttggggattatttatcctcctggggacagtttggggaggattatttattgtatttatattgaattatgtacttttttcaataaagtcttatttttgtggctaaaaaaaa

SEQ ID NO: 97 - DNA, 1201 bp, Homo sapiens; identical to SEQ ID NO: 32

SEQ ID NO: 98 - DNA, 1718 bp, Homo sapiens
gagggtgcataagttctctagtagggtgatgatataaaaagccaccggagcactccataaggcacaaactttcagagacagcagagcacacaagcttctaggacaagagccaggaagaaaccaccggaaggaaccatctcactgtgtgtaaacatgacttccaagctggccgtggctctcttggcagccttcctgatttctgcagctctgtgtgaaggtgcagttttgccaaggagtgctaaagaacttagatgtcagtgcataaagacatactccaaacctttccaccccaaatttatcaaagaactgagagtgattgagagtggaccacactgcgccaacacagaaattattgtaaagctttctgatggaagagagctctgtctggaccccaaggaaaactgggtgcagagggttgtggagaagtttttgaagagggctgagaattcataaaaaaattcattctctgtggtatccaagaatcagtgaagatgccagtgaaacttcaagcaaatctacttcaacacttcatgtattgtgtgggtctgttgtagggttgccagatgcaatacaagattcctggttaaatttgaatttcagtaaacaatgaatagtttttcattgtaccatgaaatatccagaacatacttatatgtaaagtattatttatttgaatctacaaaaaacaacaaataatttttaaatataaggattttcctagatattgcacgggagaatatacaaatagcaaaattgaggccaagggccaagagaatatccgaactttaatttcaggaattgaatgggtttgctagaatgtgatatttgaagcatcacataaaaatgatgggacaataaattttgccataaagtcaaatttagctggaaatcctggatttttttctgttaaatctggcaaccctagtctgctagccaggatccacaagtccttgttccactgtgccttggtttctcctttatttctaagtggaaaaagtattagccaccatcttacctcacagtgatgttgtgaggacatgtggaagcactttaagttttttcatcataacataaattattttcaagtgtaacttattaacctatttattatttatgtatttatttaagcatcaaatatttgtgcaagaatttggaaaaatagaagatgaatcattgattgaatagttataaagatgttatagtaaatttattttattttagatattaaatgatgttttattagataaatttcaatcagggtttttagattaaacaaacaaacaattgggtacccagttaaattttcatttcagataaacaacaaataattttttagtataagtacattattgtttatctgaaattttaattgaactaacaatcctagtttgatactcccagtcttgtcattgccagctgtgttggtagtgctgtgttgaattacggaataatgagttagaactattaaaacagccaaaactccacagtcaatattagtaatttcttgctggttgaaacttgtttattatgtacaaatagattcttataatattatttaaatgactgcatttttaaatacaaggctttatatttttaactttaagatgtttttatgtgctctccaaattttttttactgtttctgattgtatggaaatataaaagtaaatatgaaacatttaaaatataatttgttgtcaaagtaaaaaaaaaaaaaaa

SEQ ID NO: 99 - DNA, 3567 bp, Homo sapiens
agagctcgccactccttagtcgaggcaagacgtgcgcccgagccccgccgaaccgaggccacccggagccgtgcccagtccacgccggccgtgcccggcggccttaagaacccggcaacctctgccttcttccctcttccactcggagtcgcgctccgcgcgccctcactgcagcccctgcgtcgccgggaccctcgcgcgcgaccgccgaatcgctcctgcagcagagccaacatgcccatcactcggatgcgcatgagaccctggctagagatgcagattaattccaaccaaatcccggggctcatctggattaataaagaggagatgatcttccagatcccatggaagcatgctgccaagcatggctgggacatcaacaaggatgcctgtttgttccggagctgggccattcacacaggccgatacaaagcaggggaaaaggagccagatcccaagacgtggaaggccaactttcgctgtgccatgaactccctgccagatatcgaggaggtgaaagaccagagcaggaacaagggcagctcagctgtgcgagtgtaccggatgcttccacctctcaccaagaaccagagaaaagaaagaaagtcgaagtccagccgagatgctaagagcaaggccaagaggaagtcatgtggggattccagccctgataccttctctgatggactcagcagctccactctgcctgatgaccacagcagctacacagttccaggctacatgcaggacttggaggtggagcaggccctgactccagcactgtcgccatgtgctgtcagcagcactctccccgactggcacatcccagtggaagttgtgccggacagcaccagtgatctgtacaacttccaggtgtcacccatgccctccacctctgaagctacaacagatgaggatgaggaagggaaattacctgaggacatcatgaagctcttggagcagtcggagtggcagccaacaaacgtggatgggaaggggtacctactcaatgaacctggagtccagcccacctctgtctatggagactttagctgtaaggaggagccagaaattgacagcccagggggggatattgggctgagtctacagcgtgtcttcacagatctgaagaacatggatgccacctggctggacagcctgctgaccccagtccggttgccctccatccaggccattccctgtgcaccgtagcagggcccctgggcccctcttattcctctaggcaagcaggacctggcatcatggtggatatggtgcagagaagctggacttctgtgggcccctcaacagccaagtgtgaccccactgccaagtggggatggggcctccctccttgggtcattgacctctcagggcctggcaggccagtgtctgggtttttcttgtggtgtaaagctggccctgcctcctgggaagatgaggttctgagaccagtgtatcaggtcagggacttggacaggagtcagtgtctggctttttcctctgagcccagctgcctggagagggtctcgctgtcactggctggctcctaggggaacagaccagtgaccccagaaaagcataacaccaatcccagggctggctctgcactaagagaaaattgcactaaatgaatctcgttcccaaagaactacccccttttcagctgagccctggggactgttccaaagccagtgaaatgtgaaggaaagtggggtccttcggggcgatgctccctcagcctcagaggagctctaccctgctccctgctttggctgaggggcttgggaaaaaaacttggcactttttcgtgtggatcttgccacatttctgatcagaggtgtacactaacatttcccccgagctcttggcctttgcatttatttatacagtgccttgctcggcgcccaccaccccctcaagccccagcagccctcaacaggcccagggagggaagtgtgagcgccttggtatgacttaaaattggaaatgtcatctaaccattaagtcatgtgtgaacacataaggacgtgtgtaaatatgtacatttgtctttttataaaaagtaaattgtttataaggggtgtggcctttttagagagaaatttaacttgtagatgattttactttttatggaaacactgatggacttattattggcatcccgcctgaacttgactttggggtgaacagggacatgcatctattataaaatcctttcggccaggcgcggtggctcacacctgtaatcccagcactttgggaggccgagatgggtggatcacctgaggtcaggagttcgagaccagcctggtgaaactccatttctactaaaaatgcaaaaattagctgggcgtggttgcgggtgcttgtaatcccagctactcaggaggctgaggcaagagaatcgcttgaacctgggaggtggaggttgcagtgagccgagaacatgccattgcactccagcccgggcaccaaaaaaaaaaaaaaaaaaaaaaacctttcatttggccgggcatggtggcttatgcctgtaatcctggcactttgggaggccaaggtgggcagatcacctgaggtcaggagtttgagaccagcctggccaacatggtgaaacctcatctctactaaaaatacaaaaattaggccgggcacggtggctcacgcctgtaatcccagcactttgggaggcagaggcgggcggatcacgaggtcaggagatcaagaccatcctggctaacacggtgaaaccccgtctctactaaaaatataaaaaattagccgggcctagtggcgggtgcctgtagtcccagctactcgggaggctgaggcaggagaatggcatgaaccccggaggcagagcttgcagtgagccgagattgcaccactgcactacagcctgggcgacagagcgagactccgtctcaaaaaaaaaaaaaaaaattagccgggcctggtggcgggcgcctgtaatcccagctactgtggaggctgaagcacaagaatcacttgaacccgggagatggaggttgcagtgagctgagactgtgccactgcactccagcctgggtgacaagagtgagactttgtctcaaaaaaaaaaaaatccttttgtttatgttcacatagacaatggcagaaggaggggacattcctgtcataggaacatgcttatataaacatagtcacctgtccttgactatcaccagggctgtcagttgattctgggctcctggggcccaaggagtgttaagttttgaggcatgtgccataggtgatgtgtcctgctaacacacagatgctgctccaaaaagtcagttgatatgacacagtcacagacagaacagtcagcagcccaagaaaggtcctcacggctgctgtgctgggtagcacttgccatccagtttctagagtgatgaaatgctctgtctgtaccgttcaatacagtaggcactggcactagccacatgtgccagctaagcacttgaaatgtggccagtgcaataaggaattgaacttttaattgcatttaataaactgtatgtaaatagtcaaaaaaaaaaaaaa

SEQ ID NO: 100 - DNA, 2387 bp, Homo sapiens; identical to SEQ ID NO: 42

SEQ ID NO: 101 - DNA, 2379 bp, Homo sapiens; identical to SEQ ID NO: 44

SEQ ID NO: 102 - DNA, 3125 bp, Homo sapiens
ccgcaaccagagccgccgccacggtgagtggctggattcagacccctgggtggccgggacaagagaaaagagggaggagggcctttagcggacagcgcctggggctggagagcagcagctgcacacagccggaaagggcgcgcaggcgacgacactcggatccacgtcgacaccgttgtacaaagatacgcggacccgcgggcgtctaaaattctgggaagcagaacctggccggagccactagacagagccgggcctagcccagagacatggagagttgctacaacccaggtctggatggtattattgaatatgatgatttcaaattgaactcctccattgtggaacccaaggagccagccccagaaacagctgatggcccctacctggtgatcgtggaacagcctaagcagagaggcttccgatttcgatatggctgtgaaggcccctcccatggaggactgcccggtgcctccagtgagaagggccgaaagacctatcccactgtcaagatctgtaactacgagggaccagccaagatcgaggtggacctggtaacacacagtgacccacctcgtgctcatgcccacagtctggtgggcaagcaatgctcggagctggggatctgcgccgtttctgtggggcccaaggacatgactgcccaatttaacaacctgggtgtcctgcatgtgactaagaagaacatgatggggactatgatacaaaaacttcagaggcagcggctccgctctaggccccagggccttacggaggccgagcagcgggagctggagcaagaggccaaagaactgaagaaggtgatggatctgagtatagtgcggctgcgcttctctgccttccttagagccagtgatggctccttctccctgcccctgaagccagtcatctcccagcccatccatgacagcaaatctccgggggcatcaaacctgaagatttctcgaatggacaagacagcaggctctgtgcggggtggagatgaagtttatctgctttgtgacaaggtgcagaaagatgacattgaggttcggttctatgaggatgatgagaatggatggcaggcctttggggacttctctcccacagatgtgcataaacagtatgccattgtgttccggacacccccctatcacaagatgaagattgagcggcctgtaacagtgtttctgcaactgaaacgcaagcgaggaggggacgtgtctgattccaaacagttcacctattaccctctggtggaagacaaggaagaggtgcagcggaagcggaggaaggccttgcccaccttctcccagcccttcgggggtggctcccacatgggtggaggctctgggggtgcagccgggggctacggaggagctggaggaggtggcagcctcggtttcttcccctcctccctggcctacagcccctaccagtccggcgcgggccccatgggctgctacccgggaggcgggggcggggcgcagatggccgccacggtgcccagcagggactccggggaggaagccgcggagccgagcgccccctccaggaccccccagtgcgagccgcaggccccggagatgctgcagcgagctcgagagtacaacgcgcgcctgttcggcctggcgcagcgcagcgcccgagccctactcgactacggcgtcaccgcggacgcgcgcgcgctgctggcgggacagcgccacctgctgacggcgcaggacgagaacggagacacaccactgcacctagccatcatccacgggcagaccagtgtcattgagcagatagtctatgtcatccaccacgcccaggacctcggcgttgtcaacctcaccaaccacctgcaccagacgcccctgcacctggcggtgatcacggggcagacgagtgtggtgagctttctgctgcgggtaggtgcagacccagctctgctggatcggcatggagactcagccatgcatctggcgctgcgggcaggcgctggtgctcctgagctgctgcgtgcactgcttcagagtggagctcctgctgtgccccagctgttgcatatgcctgactttgagggactgtatccagtacacctggcggtccgagcccgaagccctgagtgcctggatctgctggtggacagtggggctgaagtggaggccacagagcggcaggggggacgaacagccttgcatctagccacagagatggaggagctggggttggtcacccatctggtcaccaagctccgggccaacgtgaacgctcgcacctttgcgggaaacacacccctgcacctggcagctggactggggtacccgaccctcacccgcctccttctgaaggctggtgctgacatccatgctgaaaacgaggagcccctgtgcccactgccttcaccccctacctctgatagcgactcggactctgaagggcctgagaaggacacccgaagcagcttccggggccacacgcctcttgacctcacttgcagcaccaaggtgaagaccttgctgctaaatgctgctcagaacaccatggagccacccctgaccccgcccagcccagcagggccgggactgtcacttggtgatacagctctgcagaacctggagcagctgctagacgggccagaagcccagggcagctgggcagagctggcagagcgtctggggctgcgcagcctggtagacacgtaccgacagacaacctcacccagtggcagcctcctgcgcagctacgagctggctggcggggacctggcaggtctactggaggccctgtctgacatgggcctagaggagggagtgaggctgctgaggggtccagaaacccgagacaagctgcccagcacagcagaggtgaaggaagacagtgcgtacgggagccagtcagtggagcaggaggcagagaagctgggcccaccccctgagccaccaggagggctctgccacgggcacccccagcctcaggtgcactgacctgctgcctgcccccagcccccttcccggaccccctgtacagcgtccccacctatttcaaatcttatttaacaccccacacccacccctcagttgggacaaataaaggattctcatgggaaggggaggacccctccttcccaacttatggca

SEQ ID NO: 103 - DNA, 1579 bp, Homo sapiens
agcccacagcagtccgtgccgccgtcccgcccgccagcgccccagcgaggaagcagcgcgcagcccgcggcccagcgcacccgcagcagcgcccgcagctcgtccgcgccatgttccaggcggccgagcgcccccaggagtgggccatggagggcccccgcgacgggctgaagaaggagcggctactggacgaccgccacgacagcggcctggactccatgaaagacgaggagtacgagcagatggtcaaggagctgcaggagatccgcctcgagccgcaggaggtgccgcgcggctcggagccctggaagcagcagctcaccgaggacggggactcgttcctgcacttggccatcatccatgaagaaaaggcactgaccatggaagtgatccgccaggtgaagggagacctggccttcctcaacttccagaacaacctgcagcagactccactccacttggctgtgatcaccaaccagccagaaattgctgaggcacttctgggagctggctgtgatcctgagctccgagactttcgaggaaatacccccctacaccttgcctgtgagcagggctgcctggccagcgtgggagtcctgactcagtcctgcaccaccccgcacctccactccatcctgaaggctaccaactacaatggccacacgtgtctacacttagcctctatccatggctacctgggcatcgtggagcttttggtgtccttgggtgctgatgtcaatgctcaggagccctgtaatggccggactgcccttcacctcgcagtggacctgcaaaatcctgacctggtgtcactcctgttgaagtgtggggctgatgtcaacagagttacctaccagggctattctccctaccagctcacctggggccgcccaagcacccggatacagcagcagctgggccagctgacactagaaaaccttcagatgctgccagagagtgaggatgaggagagctatgacacagagtcagagttcacggagttcacagaggacgagctgccctatgatgactgtgtgtttggaggccagcgtctgacgttatgagcgcaaaggggctgaaagaacatggacttgtatatttgtacaaaaaaaaagttttatttttctaaaaaaagaaaaaagaagaaaaaatttaaagggtgtacttatatccacactgcacactgcctggcccaaaacgtcttattgtggtaggatcagccctcattttgttgcttttgtgaactttttgtaggggacgagaaagatcattgaaattctgagaaaacttcttttaaacctcacctttgtggggtttttggagaaggttatcaaaaatttcatggaaggaccacattttatatttattgtgcttcgagtgactgaccccagtggtatcctgtgacatgtaacagccaggagtgttaagcgttcagtgatgtggggtgaaaagttactacctgtcaaggtttgtgttaccctcctgtaaatggtgtacataatgtattgttggtaattattttggtacttttatgatgtatatttattaaacagatttttacaaatgaaaaaaaaaaaaa

SEQ ID NO: 104 - DNA, 2581 bp, Homo sapiens
aatgaatgaatgaatgaatgagtgaatgaatcaacgaaggagtgagtcaaggcccgggaaccacagactccaagcctacgcagagcccgggaagggggattccggaggggcggggcctctttccggaagcgcccgccgggggcggggagggggcggggccatccgcgtgaggcgaccctgttggtccggaggggcggggcgaggaggaggacccgcttgggcggttcggctgcccacagtaaccgctgggtggacctggccagcgctccgaaccttgtcctcgctgcgcgccggcccctcggagccccacagcccgggaaggaggccgccgcgggccgggcgcccgctctgccaagcggacccgcaacccggaaaggcggcgcggcggagcctggagccggatcctgctcagaccgggccccggccggccagagccgcgggcatgtcggaggcgcggaaggggccggacgaggcggaggagagccagtacgactctggcattgagtctctgcgctctctgcgctccctacccgagtccacctcggctccagcctccgggccctcggacggcagcccccagccctgcacccatcctccgggacccgtcaaggaaccacaggagaaggaagacgcggatggggagcgggctgattccacctatggctcctcctcgctcacctacaccctgtccttgctggggggccccgaggctgaggacccggccccacgcctgccactcccccacgtgggggcgctgagccctcagcagctggaagcactcacttacatctccgaggacggagacacgctggtccacctggcagtgattcatgaggccccagcggtgctgctctgttgcctggctttgctgccccaggaggtcctggacattcaaaataacctttaccagacagcactccatctggctgtacatctggaccaaccgggcgcagttcgggcactggtgctgaagggggccagccgggcactacaggaccggcatggtgacacagcccttcatgtggcctgccagcgccagcacttggcctgtgcccgctgcctgctggaagggcggccagagccaggcagaggaacatctcactctctggacctccagctgcaaaactggcaaggtctggcttgtctccacattgccacccttcagaagaaccaaccactcatggaattgctgcttcggaatggagctgacattgatgtgcaggagggcaccagtggtaagacagcgctgcacctggctgtggaaacccaagagcggggcctggtacagttcctgctccaggctggtgcccaggtagatgcccgcatgctgaacgggtgcacacccctgcacctggcagctggccggggtctcatgggcatctcatccactctgtgcaaggcgggtgctgactccctgctgcggaatgtggaggatgagacgccccaggacctgactgaggaatcccttgtccttttgccctttgatgacctgaagatctcagggaaactgctgctgtgtaccgactgaagccaggcagggtctgggatcctcagggctccacctctccatctggaagccggagccataactgctgcagtttgggcccaggctatgtgctcttctggtgccctagggactgctgtggccagagcctggggccagccagtacagtcctgagccgaggaggagggactgcaagtggaagagagccagtctggaaggaagagctttccaggtggacagggcttcttggaagacccccaaagccccaggtatcctgggtgaagcctgtttgcctctcttgaaaatggcaggtgctcttgttttacccatgttgggtcagcctgaaactgccaaccagtaggaagcatggactctcctgagtgagaagagactgaaataggagcaagcagaaccctgagaggtgtcccatcttattgctgttgaggaccctgaaacaccgttgtttaaagacttcacacagaaggctctgaactgagccactggggaagggaagtttcagtaacatgacactaaaatggcagagacgttaaaaaaagtttttcccttctagagctgttttgcgcgcatgcatgtctgtgtgcattggggctttttagacaggcctgccctgtgactttgtggtagaggcagagagaaggaaattgtcccctgagcacggtagggccttgctgggtggggtcagaggccagtagttccaggcctttctctgtgtccagcacagacccttgtccttgctgtggaaatgatgagggatggagggacaagaggaagaatgagaggacacacgccctggagccctcaccactgccctgggggttgccatctggaggagcctggggataagggtaacccagggaggctgggcacgagggagctgactccacgtttttccccccgttcctcaccttcgagggccctgctaggtcacccctatgctggcatgaagagcatggggcaataaaccagcacagtctctgaccacttggagcgtctcatccagtgagagagacagccgttaaaagcataaacatccaaataaagatgcctttccaagtt

SEQ ID NO: 105 - DNA, 4206 bp, Homo sapiens
ataactttgtagcgagtcgaaaactgaggctccggccgcagagaactcagcctcattcctgctttaaaatctctcggccacctttgatgaggggactgggcagttctagacagtcccgaagttctcaaggcacaggtctcttcctggtttgactgtccttaccccggggaggcagtgcagccagctgcaagccccacagtgaagaacatctgagctcaaatccagataagtgacataagtgacctgctttgtaaagccatagagatggcctgtccttggaaatttctgttcaagaccaaattccaccagtatgcaatgaatggggaaaaagacatcaacaacaatgtggagaaagccccctgtgccacctccagtccagtgacacaggatgaccttcagtatcacaacctcagcaagcagcagaatgagtccccgcagcccctcgtggagacgggaaagaagtctccagaatctctggtcaagctggatgcaaccccattgtcctccccacggcatgtgaggatcaaaaactggggcagcgggatgactttccaagacacacttcaccataaggccaaagggattttaacttgcaggtccaaatcttgcctggggtccattatgactcccaaaagtttgaccagaggacccagggacaagcctacccctccagatgagcttctacctcaagctatcgaatttgtcaaccaatattacggctccttcaaagaggcaaaaatagaggaacatctggccagggtggaagcggtaacaaaggagatagaaacaacaggaacctaccaactgacgggagatgagctcatcttcgccaccaagcaggcctggcgcaatgccccacgctgcattgggaggatccagtggtccaacctgcaggtcttcgatgcccgcagctgttccactgcccgggaaatgtttgaacacatctgcagacacgtgcgttactccaccaacaatggcaacatcaggtcggccatcaccgtgttcccccagcggagtgatggcaagcacgacttccgggtgtggaatgctcagctcatccgctatgctggctaccagatgccagatggcagcatcagaggggaccctgccaacgtggaattcactcagctgtgcatcgacctgggctggaagcccaagtacggccgcttcgatgtggtccccctggtcctgcaggccaatggccgtgaccctgagctcttcgaaatcccacctgaccttgtgcttgaggtggccatggaacatcccaaatacgagtggtttcgggaactggagctaaagtggtacgccctgcctgcagtggccaacatgctgcttgaggtgggcggcctggagttcccagggtgccccttcaatggctggtacatgggcacagagatcggagtccgggacttctgtgacgtccagcgctacaacatcctggaggaagtgggcaggagaatgggcctggaaacgcacaagctggcctcgctctggaaagaccaggctgtcgttgagatcaacattgctgtgctccatagtttccagaagcagaatgtgaccatcatggaccaccactcggctgcagaatccttcatgaagtacatgcagaatgaataccggtcccgtgggggctgcccggcagactggatttggctggtccctcccatgtctgggagcatcacccccgtgtttcaccaggagatgctgaactacgtcctgtcccctttctactactatcaggtagaggcctggaaaacccatgtctggcaggacgagaagcggagacccaagagaagagagattccattgaaagtcttggtcaaagctgtgctctttgcctgtatgctgatgcgcaagacaatggcgtcccgagtcagagtcaccatcctctttgcgacagagacaggaaaatcagaggcgctggcctgggacctgggggccttattcagctgtgccttcaaccccaaggttgtctgcatggataagtacaggctgagctgcctggaggaggaacggctgctgttggtggtgaccagtacgtttggcaatggagactgccctggcaatggagagaaactgaagaaatcgctcttcatgctgaaagagctcaacaacaaattcaggtacgctgtgtttggcctcggctccagcatgtaccctcggttctgcgcctttgctcatgacattgatcagaagctgtcccacctgggggcctctcagctcaccccgatgggagaaggggatgagctcagtgggcaggaggacgccttccgcagctgggccgtgcaaaccttcaaggcagcctgtgagacgtttgatgtccgaggcaaacagcacattcagatccccaagctctacacctccaatgtgacctgggacccgcaccactacaggctcgtgcaggactcacagcctttggacctcagcaaagccctcagcagcatgcatgccaagaacgtgttcaccatgaggctcaaatctcggcagaatctacaaagtccgacatccagccgtgccaccatcctggtggaactctcctgtgaggatggccaaggcctgaactacctgccgggggagcaccttggggtttgcccaggcaaccagccggccctggtccaaggtatcctggagcgagtggtggatggccccacaccccaccagacagtgcgcctggaggccctggatgagagtggcagctactgggtcagtgacaagaggctgcccccctgctcactcagccaggccctcacctacttcctggacatcaccacacccccaacccagctgctgctccaaaagctggcccaggtggccacagaagagcctgagagacagaggctggaggccctgtgccagccctcagagtacagcaagtggaagttcaccaacagccccacattcctggaggtgctagaggagttcccgtccctgcgggtgtctgctggcttcctgctttcccagctccccattctgaagcccaggttctactccatcagctcctcccgggatcacacgcccacagagatccacctgactgtggccgtggtcacctaccacacccgagatggccagggtcccctgcaccacggcgtctgcagcacatggctcaacagcctgaagccccaagacccagtgccctgctttgtgcggaatgccagcggcttccacctccccgaggatccctcccatccttgcatcctcatcgggcctggcacaggcatcgcgcccttccgcagtttctggcagcaacggctccatgactcccagcacaagggagtgcggggaggccgcatgaccttggtgtttgggtgccgccgcccagatgaggaccacatctaccaggaggagatgctggagatggcccagaagggggtgctgcatgcggtgcacacagcctattcccgcctgcctggcaagcccaaggtctatgttcaggacatcctgcggcagcagctggccagcgaggtgctccgtgtgctccacaaggagccaggccacctctatgtttgcggggatgtgcgcatggcccgggacgtggcccacaccctgaagcagctggtggctgccaagctgaaattgaatgaggagcaggtcgaggactatttctttcagctcaagagccagaagcgctatcacgaagatatctttggtgctgtatttccttacgaggcgaagaaggacagggtggcggtgcagcccagcagcctggagatgtcagcgctctgagggcctacaggaggggttaaagctgccggcacagaacttaaggatggagccagctctgcattatctgaggtcacagggcctggggagatggaggaaagtgatatcccccagcctcaagtcttatttcctcaacgttgctccccatcaagccctttacttgacctcctaacaagtagcaccctggattgatcggagcctcctctctcaaactggggcctccctggtcccttggagacaaaatcttaaatgccaggcctggcaagtgggtgaaagatggaacttgctgctgagtgcaccacttcaagtgaccaccaggaggtgctatcgcaccactgtgtatttaactgccttgtgtacagttatttatgcctctgtatttaaaaaactaacacccagtctgttccccatggccacttgggtcttccctgtatgattccttgatggagatatttacatgaattgcattttactttaatcaca

SEQ ID NO: 106 - DNA, 4507 bp, Homo sapiens; identical to SEQ ID NO: 51

SEQ ID NO: 107 - DNA, 3875 bp, Homo sapiens
agctgttcttggctgacttcacatcaaaactcctatactgacctgagacagaggcagcagtgatacccacctgagagatcctgtgtttgaacaactgcttcccaaaacggaaagtatttcaagcctaaacctttgggtgaaaagaactcttgaagtcatgattgcttcacagtttctctcagctctcactttggtgcttctcattaaagagagtggagcctggtcttacaacacctccacggaagctatgacttatgatgaggccagtgcttattgtcagcaaaggtacacacacctggttgcaattcaaaacaaagaagagattgagtacctaaactccatattgagctattcaccaagttattactggattggaatcagaaaagtcaacaatgtgtgggtctgggtaggaacccagaaacctctgacagaagaagccaagaactgggctccaggtgaacccaacaataggcaaaaagatgaggactgcgtggagatctacatcaagagagaaaaagatgtgggcatgtggaatgatgagaggtgcagcaagaagaagcttgccctatgctacacagctgcctgtaccaatacatcctgcagtggccacggtgaatgtgtagagaccatcaataattacacttgcaagtgtgaccctggcttcagtggactcaagtgtgagcaaattgtgaactgtacagccctggaatcccctgagcatggaagcctggtttgcagtcacccactgggaaacttcagctacaattcttcctgctctatcagctgtgataggggttacctgccaagcagcatggagaccatgcagtgtatgtcctctggagaatggagtgctcctattccagcctgcaatgtggttgagtgtgatgctgtgacaaatccagccaatgggttcgtggaatgtttccaaaaccctggaagcttcccatggaacacaacctgtacatttgactgtgaagaaggatttgaactaatgggagcccagagccttcagtgtacctcatctgggaattgggacaacgagaagccaacgtgtaaagctgtgacatgcagggccgtccgccagcctcagaatggctctgtgaggtgcagccattcccctgctggagagttcaccttcaaatcatcctgcaacttcacctgtgaggaaggcttcatgttgcagggaccagcccaggttgaatgcaccactcaagggcagtggacacagcaaatcccagtttgtgaagctttccagtgcacagccttgtccaaccccgagcgaggctacatgaattgtcttcctagtgcttctggcagtttccgttatgggtccagctgtgagttctcctgtgagcagggttttgtgttgaagggatccaaaaggctccaatgtggccccacaggggagtgggacaacgagaagcccacatgtgaagctgtgagatgcgatgctgtccaccagcccccgaagggtttggtgaggtgtgctcattcccctattggagaattcacctacaagtcctcttgtgccttcagctgtgaggagggatttgaattacatggatcaactcaacttgagtgcacatctcagggacaatggacagaagaggttccttcctgccaagtggtaaaatgttcaagcctggcagttccgggaaagatcaacatgagctgcagtggggagcccgtgtttggcactgtgtgcaagttcgcctgtcctgaaggatggacgctcaatggctctgcagctcggacatgtggagccacaggacactggtctggcctgctacctacctgtgaagctcccactgagtccaacattcccttggtagctggactttctgctgctggactctccctcctgacattagcaccatttctcctctggcttcggaaatgcttacggaaagcaaagaaatttgttcctgccagcagctgccaaagccttgaatcagatggaagctaccaaaagccttcttacatcctttaagttcaaaagaatcagaaacaggtgcatctggggaactagagggatacactgaagttaacagagacagataactctcctcgggtctctggcccttcttgcctactatgccagatgcctttatggctgaaaccgcaacacccatcaccacttcaatagatcaaagtccagcaggcaaggacggccttcaactgaaaagactcagtgttccctttcctactctcaggatcaagaaagtgttggctaatgaagggaaaggatattttcttccaagcaaaggtgaagagaccaagactctgaaatctcagaattccttttctaactctcccttgctcgctgtaaaatcttggcacagaaacacaatattttgtggctttctttcttttgcccttcacagtgtttcgacagctgattacacagttgctgtcataagaatgaataataattatccagagtttagaggaaaaaaatgactaaaaatattataacttaaaaaaatgacagatgttgaatgcccacaggcaaatgcatggagggttgttaatggtgcaaatcctactgaatgctctgtgcgagggttactatgcacaatttaatcactttcatccctatgggattcagtgcttcttaaagagttcttaaggattgtgatatttttacttgcattgaatatattataatcttccatacttcttcattcaatacaagtgtggtagggacttaaaaaacttgtaaatgctgtcaactatgatatggtaaaagttacttattctagattaccccctcattgtttattaacaaattatgttacatctgttttaaatttatttcaaaaagggaaactattgtcccctagcaaggcatgatgttaaccagaataaagttctgagtgtttttactacagttgttttttgaaaacatggtagaattggagagtaaaaactgaatggaaggtttgtatattgtcagatattttttcagaaatatgtggtttccacgatgaaaaacttccatgaggccaaacgttttgaactaataaaagcataaatgcaaacacacaaaggtataattttatgaatgtctttgttggaaaagaatacagaaagatggatgtgctttgcattcctacaaagatgtttgtcagatatgatatgtaaacataattcttgtatattatggaagattttaaattcacaatagaaactcaccatgtaaaagagtcatctggtagatttttaacgaatgaagatgtctaatagttattccctatttgttttcttctgtatgttagggtgctctggaagagaggaatgcctgtgtgagcaagcatttatgtttatttataagcagatttaacaattccaaaggaatctccagttttcagttgatcactggcaatgaaaaattctcagtcagtaattgccaaagctgctctagccttgaggagtgtgagaatcaaaactctcctacacttccattaacttagcatgtgttgaaaaaaaagtttcagagaagttctggctgaacactggcaacaacaaagccaacagtcaaaacagagatgtgataaggatcagaacagcagaggttcttttaaaggggcagaaaaactctgggaaataagagagaacaactactgtgatcaggctatgtatggaatacagtgttattttctttgaaattgtttaagtgttgtaaatatttatgtaaactgcattagaaattagctgtgtgaaataccagtgtggtttgtgtttgagttttattgagaattttaaattataacttaaaatattttataatttttaaagtatatatttatttaagcttatgtcagacctatttgacataacactataaaggttgacaataaatgtgcttatgttta

SEQ ID NO: 108 - DNA, 1593 bp, Homo sapiens
gcggtgcccttgcggcgcagctggggtcgcggccctgctccccgcgctttcttaaggcccgcgggcggcgcaggagcggcactcgtggctgtggtggcttcggcagcggcttcagcagatcggcggcatcagcggtagcaccagcactagcagcatgttgagccgggcagtgtgcggcaccagcaggcagctggctccggttttggggtatctgggctccaggcagaagcacagcctccccgacctgccctacgactacggcgccctggaacctcacatcaacgcgcagatcatgcagctgcaccacagcaagcaccacgcggcctacgtgaacaacctgaacgtcaccgaggagaagtaccaggaggcgttggccaagggagatgttacagcccagatagctcttcagcctgcactgaagttcaatggtggtggtcatatcaatcatagcattttctggacaaacctcagccctaacggtggtggagaacccaaaggggagttgctggaagccatcaaacgtgactttggttcctttgacaagtttaaggagaagctgacggctgcatctgttggtgtccaaggctcaggttggggttggcttggtttcaataaggaacggggacacttacaaattgctgcttgtccaaatcaggatccactgcaaggaacaacaggccttattccactgctggggattgatgtgtgggagcacgcttactaccttcagtataaaaatgtcaggcctgattatctaaaagctatttggaatgtaatcaactgggagaatgtaactgaaagatacatggcttgcaaaaagtaaaccacgatcgttatgctgagtatgttaagctctttatgactgtttttgtagtggtatagagtactgcagaatacagtaagctgctctattgtagcatttcttgatgttgcttagtcacttatttcataaacaacttaatgttctgaataatttcttactaaacattttgttattgggcaagtgattgaaaatagtaaatgctttgtgtgattgaatctgattggacattttcttcagagagctaaattacaattgtcatttataaaaccatcaaaaatattccatccatatactttggggacttgtagggatgcctttctagtcctattctattgcagttatagaaaatctagtcttttgccccagttacttaaaaataaaatattaacactttcccaagggaaacactcggctttctatagaaaattgcactttttgtcgagtaatcctctgcagtgatacttctggtagatgtcacccagtggtttttgttaggtcaaatgttcctgtatagtttttgcaaatagagctgtatactgtttaaatgtagcaggtgaactgaactggggtttgctcacctgcacagtaaaggcaaacttcaacagcaaaactgcaaaaaggtggtttttgcagtaggagaaaggaggatgtttatttgcagggcgccaagcaaggagaattgggcagctcatgcttgagacccaatctccatgatgacctacaagctagagtatttaaaggcagtggtaaatttcaggaaagcagaagtt

SEQ ID NO: 109 - DNA, 4314 bp, Homo sapiens
agacaggatattcactgctgtggcaaggcctgtagagagtttcgaagttaggaggactcaagacggtccctccctggacttttctgaaggggctcaaaagatgacacgcgccagagctggaaggcgtcgccaattggtccacttttccctcctccctttttgcggatgagaaaactgaggcccaggtttgggatttccagagcccgggatttcccggcaacgcccgacaaccacattcccccggctattctgacccgccccggttccgggacgctccctgggagccgccgccgagggcctgctgggactcccgggggaccccgccgtcggggcagcccccacgcccggcgccgcccgccgggaacggccgccgctgttgcgcacttgcaggggagccggcgactgagggcgaggcagggagggagcaagcggggctgggagggctgctggcgcgggctcgcgcgctgtgtatggtctatcgcaggcagctgacctttgaggaggaaatcgctgctctccgctccttcctgtagtaacagccgccgctgccgccgccgccaggaaccccggccgggagcgagagccgcggggcgcagagccggcccggctgccggacggtgcggccccaccaggtgaacggccatggcgggctggatccaggcccagcagctgcagggagacgcgctgcgccagatgcaggtgctgtacggccagcacttccccatcgaggtccggcactacttggcccagtggattgagagccagccatgggatgccattgacttggacaatccccaggacagagcccaagccacccagctcctggagggcctggtgcaggagctgcagaagaaggcggagcaccaggtgggggaagatgggtttttactgaagatcaagctggggcactacgccacgcagctccagaaaacatatgaccgctgccccctggagctggtccgctgcatccggcacattctgtacaatgaacagaggctggtccgagaagccaacaattgcagctctccggctgggatcctggttgacgccatgtcccagaagcaccttcagatcaaccagacatttgaggagctgcgactggtcacgcaggacacagagaatgagctgaagaaactgcagcagactcaggagtacttcatcatccagtaccaggagagcctgaggatccaagctcagtttgcccagctggcccagctgagcccccaggagcgtctgagccgggagacggccctccagcagaagcaggtgtctctggaggcctggttgcagcgtgaggcacagacactgcagcagtaccgcgtggagctggccgagaagcaccagaagaccctgcagctgctgcggaagcagcagaccatcatcctggatgacgagctgatccagtggaagcggcggcagcagctggccgggaacggcgggccccccgagggcagcctggacgtgctacagtcctggtgtgagaagttggccgagatcatctggcagaaccggcagcagatccgcagggctgagcacctctgccagcagctgcccatccccggcccagtggaggagatgctggccgaggtcaacgccaccatcacggacattatctcagccctggtgaccagcacattcatcattgagaagcagcctcctcaggtcctgaagacccagaccaagtttgcagccaccgtacgcctgctggtgggcgggaagctgaacgtgcacatgaatcccccccaggtgaaggccaccatcatcagtgagcagcaggccaagtctctgcttaaaaatgagaacacccgcaacgagtgcagtggtgagatcctgaacaactgctgcgtgatggagtaccaccaagccacgggcaccctcagtgcccacttcaggaacatgtcactgaagaggatcaagcgtgctgaccggcggggtgcagagtccgtgacagaggagaagttcacagtcctgtttgagtctcagttcagtgttggcagcaatgagcttgtgttccaggtgaagactctgtccctacctgtggttgtcatcgtccacggcagccaggaccacaatgccacggctactgtgctgtgggacaatgcctttgctgagccgggcagggtgccatttgccgtgcctgacaaagtgctgtggccgcagctgtgtgaggcgctcaacatgaaattcaaggccgaagtgcagagcaaccggggcctgaccaaggagaacctcgtgttcctggcgcagaaactgttcaacaacagcagcagccacctggaggactacagtggcctgtccgtgtcctggtcccagttcaacagggagaacttgccgggctggaactacaccttctggcagtggtttgacggggtgatggaggtgttgaagaagcaccacaagccccactggaatgatggggccatcctaggttttgtgaataagcaacaggcccacgacctgctcatcaacaagcccgacgggaccttcttgttgcgctttagtgactcagaaatcgggggcatcaccatcgcctggaagtttgactccccggaacgcaacctgtggaacctgaaaccattcaccacgcgggatttctccatcaggtccctggctgaccggctgggggacctgagctatctcatctatgtgtttcctgaccgccccaaggatgaggtcttctccaagtactacactcctgtgctggctaaagctgttgatggatatgtgaaaccacagatcaagcaagtggtccctgagtttgtgaatgcatctgcagatgctgggggcagcagcgccacgtacatggaccaggccccctccccagctgtgtgcccccaggctccctataacatgtacccacagaaccctgaccatgtactcgatcaggatggagaattcgacctggatgagaccatggatgtggccaggcacgtggaggaactcttacgccgaccaatggacagtcttgactcccgcctctcgccccctgccggtcttttcacctctgccagaggctccctctcatgaatgtttgaatcccacgcttctctttggaaacaatatgcaatgtgaagcggtcgtgttgtgagtttagtaaggctgtgtacactgacacctttgcaggcatgcatgtgcttgtgtgtgtgtgtgtgtgtgtgtccttgtgcatgagctacgcctgcctcccctgtgcagtcctgggatgtggctgcagcagcggtggcctcttttcagatcatggcatccaagagtgcgccgagtctgtctctgtcatggtagagaccgagcctctgtcactgcaggcactcaatgcagccagacctattcctcctgggcccctcatctgctcagcagctatttgaatgagatgattcagaaggggaggggagacaggtaacgtctgtaagctgaagtttcactccggagtgagaagctttgccctcctaagagagagagacagagagacagagagagagaaagagagagtgtgtgggtctatgtaaatgcatctgtcctcatgtgttgatgtaaccgattcatctctcagaagggaggctggggttcattttcgagtagtattttatactttagtgaacgtggactccagactctctgtgaaccctatgagagcgcgtctgggcccggccatgtccttagcacaggggggccgccggtttgagtgagggtttctgagctgctctgaattagtccttgcttggctgcttggccttgggcttcattcaagtctatgatgctgttgcccacgtttcccgggatatatattctctcccctccgttgggccccagccttctttgcttgcctctctgtttgtaaccttgtcgacaaagaggtagaaaagattgggtctaggatatggtgggtggacaggggccccgggacttggagggttggtcctcttgcctcctggaaaaaacaaaaacaaaaaactgcagtgaaagacaagctgcaaatcagccatgtgctgcgtgcctgtggaatctggagtgaggggtaaaagctgatctggtttgactccgctggaggtggggcctggagcaggccttgcgctgttgcgtaactggctgtgttctggtgaggccttgctcccaaccccacacgctcctccctctgaggctgtaggactcgcagtcaggggcagctgaccatggaagattgagagcccaaggtttaaacttctctgaagggaggtggggatgagaagaggggtttttttgtactttgtacaaagaccacacatttgtgtaaacagtgttttggaataaaatatttttttcataaaaaaaaaaaaaaaa

SEQ ID NO: 110 - DNA, 1686 bp, Homo sapiens
cagacgctccctcagcaaggacagcagaggaccagctaagagggagagaagcaactacagaccccccctgaaaacaaccctcagacgccacatcccctgacaagctgccaggcaggttctcttcctctcacatactgacccacggctccaccctctctcccctggaaaggacaccatgagcactgaaagcatgatccgggacgtggagctggccgaggaggcgctccccaagaagacaggggggccccagggctccaggcggtgcttgttcctcagcctcttctccttcctgatcgtggcaggcgccaccacgctcttctgcctgctgcactttggagtgatcggcccccagagggaagagttccccagggacctctctctaatcagccctctggcccaggcagtcagatcatcttctcgaaccccgagtgacaagcctgtagcccatgttgtagcaaaccctcaagctgaggggcagctccagtggctgaaccgccgggccaatgccctcctggccaatggcgtggagctgagagataaccagctggtggtgccatcagagggcctgtacctcatctactcccaggtcctcttcaagggccaaggctgcccctccacccatgtgctcctcacccacaccatcagccgcatcgccgtctcctaccagaccaaggtcaacctcctctctgccatcaagagcccctgccagagggagaccccagagggggctgaggccaagccctggtatgagcccatctatctgggaggggtcttccagctggagaagggtgaccgactcagcgctgagatcaatcggcccgactatctcgactttgccgagtctgggcaggtctactttgggatcattgccctgtgaggaggacgaacatccaaccttcccaaacgcctcccctgccccaatccctttattaccccctccttcagacaccctcaacctcttctggctcaaaaagagaattgggggcttagggtcggaacccaagcttagaactttaagcaacaagaccaccacttcgaaacctgggattcaggaatgtgtggcctgcacagtgaagtgctggcaaccactaagaattcaaactggggcctccagaactcactggggcctacagctttgatccctgacatctggaatctggagaccagggagcctttggttctggccagaatgctgcaggacttgagaagacctcacctagaaattgacacaagtggaccttaggccttcctctctccagatgtttccagacttccttgagacacggagcccagccctccccatggagccagctccctctatttatgtttgcacttgtgattatttattatttatttattatttatttatttacagatgaatgtatttatttgggagaccggggtatcctgggggacccaatgtaggagctgccttggctcagacatgttttccgtgaaaacggagctgaacaataggctgttcccatgtagccccctggcctctgtgccttcttttgattatgttttttaaaatatttatctgattaagttgtctaaacaatgctgatttggtgaccaactgtcactcattgctgagcctctgctccccaggggagttgtgtctgtaatcgccctactattcagtggcgagaaataaagtttgcttagaaaagaaaaaaaaaaaaa

SEQ ID NO: 111 - DNA, 4180 bp, Homo sapiens
ccagggtgatgctgaagatgatgaccttcttccaaggcctctagagccatcagcctgtgccaggcaccctcgacttgcctagaggcccccaaaagttgcagtccacatcagaggcagagtcagaggcctccatgtcggaggcctcctctgaggacctggtgccacccctggaggctggggcagccccatatagggaggaggaagaggcggcgaagaagaagaaggagaagaagaagaagtccaaaggcctggccaatgtgttctgcgtcttcaccaaagggaagaagaagaagggtcagcccagctcagcggagcccgaggacgcagccgggtccaggcaggggctggatggcccgccccccacagtggaggagctgaaggcggcgctggagcgcgggcagctggaggcggcgcggccgctgctggcgctggagcgggagctggcggcggcggcggcggcgggcggtgtgagcgaggaggagctggtgcggcgccagagcaaggtggaggcgctgtacgagctgctgcgcgaccaggtgctgggcgtgctgcggcggccgctggaggcgccgcccgagcggctgcgccaggcgctggccgtggtggcggagcaggagcgcgaggaccgccaggcggcggcggcggggccggggacctcggggctggcggccacgcgcccgcggcgctggctgcagctgtggcggcgcggcgtggcggaggcggccgaggagcgcatgggccagcggccggccgcgggcgccgaggtccccgagagcgtctttctgcacttgggccgcaccatgaaggaggacctggaggccgtggtggagcggctgaagccgctgttccccgccgagttcggcgtcgtggcggcctacgccgagagctaccaccagcacttcgcggcccacctggccgccgtggcgcagttcgagctgtgcgagcgcgacacctacatgctgctgctctgggtgcagaacctctaccccaatgacatcatcaacagccccaagctggtgggtgagctgcagggtatggggctcgggagcctcctgccccccaggcagatccgactgctggaggccacattcctgtccagtgaggcggccaatgtgagggagttgatggaccgagctctggagctagaggcacggcgctgggctgaggatgtgcctccccagaggctggacggccactgccacagcgagctggccatcgacatcatccagatcacctcccaggcccaggccaaggccgagagcatcacgctggacttgggctcacagataaagcgggtgctgctggtggagctgcctgcgttcctgaggagctaccagcgcgcctttaatgaatttctggagagaggcaagcagctgacgaattacagggccaatgttattgccaacatcaacaactgcctgtccttccggatgtccatggagcagaattggcaggtaccccaggacaccctgagcctcctgctgggccccctgggtgagctcaagagccacggctttgacaccctgctccagaacctgcatgaggacctgaagccactgttcaagaggttcacgcacacccgctgggcggcccctgtggagaccctggaaaacatcatcgccactgtagacacgaggctgcctgagttctcagagctgcagggctgtttccgggaggagctcatggaggccttgcacctgcacctggtgaaggagtacatcatccaactcagcaaggggcgcctggtcctcaagacggccgagcagcagcagcagctggctgggtacatcctggccaatgctgacaccatccagcacttctgcacccagcacggctccccggcgacctggctgcagcctgctctccctacgctggccgagatcattcgcctgcaggaccccagtgccatcaagattgaggtggccacttatgccacctgctaccctgacttcagcaaaggccacctgagcgctatcctggccatcaaggggaacctatccaacagtgaggtcaagcgcatccggagcatcttggacgtcagcatgggggcgcaggagccctcccggcccctattttcccttataaaggttggttagcttttcctgtggcctgacctgcctgtgagtgcccagcaagccttgggcacaccccgctgggagctgttaagagcagcgctggttctcggttcctcccgggtctcctgtgctctgatgctacttctgcctagccctggcggaggtgcaggccctgtcagctggaactggacagaccttggtttgtttacatgtccgatgggggcaggagctcccatcctgggcagccaaccaggcaacaccaaggactctttgtaaacgatagctgatcgtgtgcacgcaaggaaagaaccaggagggagagtgcagccaggctcagggatccccggacacctctgtccagagcccctccacagtcggcctcatgactgtcctcctcgtgggtggggccgagggccctcttcagctctctggagacaggggccgagcctcacccatctgccctctgcagcccagggccgccgtgagcgggattcagcaatggtggaatggaagacagaactggaagagaaagaaggaaaagatgagctctcgtctggcaggggcttttagggtcctgtggcgagctgtgagcaccgccagcattagacgtcacatccaggtggccccacggcccctacaggctggccctgcaatggggccctgagccctccctcttcatcccccaaggcctcaactagagggtggtcccccgagggcttggtgtctactaccgaagggcccaagacctcctgggtcctctcaggctcccccttccccaaggcagggacaggccctgggggtgccaccgtgggccctgccacccagaagtctggctgaggtctgggcaggggcagggcaagcttgacctctcactgttgaccctttggcctctgtatttgtttcctattgccgtgacaggtttccacaaacttcgtggatcaaaacgaggtcttccagttctgcgggtcagaaggctgacccggggctcaaatctgggtgtcggcagtcctgcactccttctggaggctctaggggagaattcatttctggccttttcatttttagaggctgaccgtaattcttgacttcaggctcctccatcttcagagccagctgtgggtagttgaatctttttcccgtcacctcattgaggcctcccctctcctgcctccctccaccacttttttttttttttttttgagacagggtcttgctgtgttgcccaggctggagtgcagtggcctggtcatggcatcaaggctcactgcagcctggacctcctggttcaagtgatcctcttgtctcagtcccctgagacaatcccccacgcccagctacatattttttgtggatacagggtctcattctgttgcctaggcttgtctggaactcctgggctcaagggatcttgtagccttagcctcctaaagtgctgggattataggcatgagtcactgtacccggcctgctctaccgcttttaaggacgcttatgatcacattgcgcctacccagagaacccaggtcgtctttctattttcaggtcagctgattagccaccttagttccatctgcaactttagttcccactggctgtgtaacctaacatagtcacaggctctggggactgtcacgtggacatctttgggaggccgttattctgcccaccgcaccctccgttcatcccctgccctgccgggcacctcgctctaccccaggaaaatgtgagctcgttttcctgctcggcatgtgctccccctaaggctctgctcctccctgggcctgaaagttccttctcagcctgagagggggcccttcggactcaggcatgactcagcccggctgatgcctctgcagtgctgagtcaggatttggggccggctctcttgggtccgtccccttttcccaggtactgccttacaaagctgtggccaggaagtggccggtataaaggatgcccaaggtctttgtacgtgtgtaggagttagcgtgtttgatattgttaatataataataattattttttagagtactgcttttgtatgtatgttgaacaggatccaggtttttatagcttgatataaaacagaattcaaaagtgaaaaa

SEQ ID NO: 112 - DNA, 2933 bp, Homo sapiens
agtctccggggactttcccaggggtggggcggcccggccaggcccccggcacttcctcgtcctcggcccgggtgccctgcccccgtccaggagccctaggagtgctacggggggccggagccttgcccgggccgctgccccgtccctggattcggggctggacgcagcaagcggggcgctgtgtccccaagctccccgtcctcggccaggcgggcaccacggcaggggctgagctaccctcatggaagggagaggaccgtaccggatctacgaccctgggggcagcgtgccctcaggagaggcatccgcagcttttgagcgcctagtgaaggagaattcccggctgaaggaaaaaatgcaagggataaagatgttaggggagcttttggaagagtcccagatggaagcgaccaggctccggcagaaggcagaggagctagtgaaggacaacgagctgctcccaccaccttctccctccttgggctccttcgaccccctggctgagctcacaggaaaggactcaaatgtcacagcatctcccacagcccctgcatgccccagtgacaagccagcaccagtccagaagcctccatccagtggcacctcctctgaatttgaagtggtcactcctgaggagcagaattcaccagagagcagcagccatgccaatgcgatggcgctgggccccctgccccgtgaggacggcaacctgatgctgcacctgcagcgcctggagaccacgctgagtgtgtgtgccgaggagccggaccacggccagctcttcacccacctgggccgcatggccctggagttcaaccgactggcatccaaggtgcacaagaatgagcagcgcacctccattctgcagaccctgtgtgagcagcttcggaaggagaacgaggctctgaaggccaagttggataagggcctggaacagcgggatcaggctgccgagaggctgcgggaggaaaatttggagctcaagaagttgttgatgagcaatggcaacaaagagggtgcgtctgggcggccaggctcaccgaagatggaagggacaggcaagaaggcagtggctggacagcagcaggctagtgtgacggcaggtaaggtcccagaggtggtggccttgggcgcagccgagaagaaggtgaagatgctggagcagcagcgcagtgagctgctggaagtgaacaagcagtgggaccagcatttccggtccatgaagcagcagtatgagcagaagatcactgagctgcgtcagaagctggctgatttgcagaagcaggtgactgacctggaggccgagcgggagcagaagcagcgtgactttgaccgcaagctcctcctggccaagtccaagattgaaatggaggagaccgacaaggagcagctgacagcagaggccaaggagctgcgccaaaaggtcaagtacctgcaggatcagctgagcccactcacccgacagcgtgagtaccaggaaaaggagatccagcggctcaacaaggccctggaggaagcactgagcatccaaaccccgccatcatctccaccaacagcatttgggagcccagaaggagcaggggccctcctaaggaaacaggagctggtcacgcagaatgagttgctgaaacagcaggtgaagatcttcgaggaggacttccagagggagcgcagtgatcgtgagcgcatgaatgaggagaaggaagagctgaagaagcaagtggagaagctgcaggcccaggtcaccctgtcaaatgcccagctaaaagcattcaaagatgaggagaaggcaagagaagccctcagacagcagaagaggaaagcaaaggcctcaggagagcgttaccatgtggagccccacccagaacatctctgcggggcctacccctacgcctacccgcccatgccagccatggtgccacaccatggcttcgaggactggtcccagatccgctacccccctccccccatggccatggagcacccgcccccactccccaactcgcgcctcttccatctgccggaatacacctggcgtctaccctgtggaggggttcgaaatccaaatcagagctcccaagtgatggaccctcccacagccaggcctacagaaccagagtctccaaaaaatgaccgtgaggggcctcagtgagaccagattgtgtcatttggctccaccttcatcttgcagagccagctgatctcagattgccaagaaactagaagccacttgcacggtgtggccagagcctcagctggatgagaggctgagatgggtggccagcttgtacaccagtccctgaactgagctgtttacaggactggggaggctccacccagaaggctttcatttgtactctgctgggagtgactgggaaaaactccttccctgctgctgagtggagagaggcctcatccggctttgacccaccatccgttgcagaagcctccaggagcagcaatcctaagagtgggaggcagccaagacccccttccttcaaaacctcccggaagtggtttcaggccctctagttgccatgaccaatttgtgtgtgtgtttaatttttgcttcaagctctgtagcaggacctgccccacgcacacccctacccctctgtgaggagctgtgggaagtgtgggtttgtctccagaacagaagagaatgatggatattctggctctggggccctctccaccaccactcacagtagccttgctgaagccatcacagatgggagaaggccatgccagccacgtccgccgaggggcgccagcctgaagctgccaggccctgaggttcagaccctggaccccatagctggaggcctgtggtgccagaagcccagattagggtggctgtccatccctggatagctatttgcacgaatcatggacataaatccaagttgaagaagatcaacaaaaaaaaaaaa

SEQ ID NO: 113 - DNA, 4450 bp, Homo sapiens
gtaaagtggtggcacctgaccggagcatgtagccacctatgacttcctgagtggggtggtgtggggagggccctgaggagtctgtggtcctaggccttggatttcatcagggctttcctgctccttctggttgcctcagtcccaggcaagatagggtcccagaatcttacagcccagaggccacctgttgcaacttcttttttacagatggagtcatcagaacccactgtgaggaagtgacttctccttgaggtcacccagacactccaaacagagcagagcaaaagcgcctagaacttgaaattttggacctgtctccaacaccctggggatttccaccaggaagccttcagtcaccatccaggggatttttatcgccacaaagggtaattcctgctccatccctgctgtgactcagctgtgacgttgaaccacacaagccagagagaagaagataaagtcatcagagctcctactcaccagagagtgaggcccaggccaggactccacaaggctggtcccctgccctggagcaacttaaacaggccctctggccagcctggaaccctgagatggcctccagctcaggcagcagtcctcgcccggcccctgatgagaatgagtttccctttgggtgccctcccaccgtctgccaggacccaaaggagcccagggctctctgctgtgcaggctgtctctctgagaacccgaggaatggcgaggatcagatctgccccaaatgcagaggggaagacctccagtctataagcccaggaagccgtcttcgaactcaggagaaggctcaccccgaggtggctgaggctggaattgggtgcccctttgcaggtgtcggctgctccttcaagggaagcccacagtctgtgcaagagcatgaggtcacctcccagacctcccacctaaacctgctgttggggttcatgaaacagtggaaggcccggctgggctgtggcctggagtctgggcccatggccctggagcagaacctgtcagacctgcagctgcaggcagccgtggaagtggcgggggacctggaggtcgattgctaccgggcaccctgctccgagagccaggaggagctggccctgcagcacttcatgaaggagaagcttctggctgagctggaggggaagctgcgtgtgtttgagaacattgttgctgtcctcaacaaggaggtggaggcctcccacctggccctggccacctctatccaccagagccagctggaccgtgagcgcatcctgagcttggagcagagggtggtggagcttcagcagaccctggcccagaaagaccaggccctgggcaagctggagcagagcttgcgcctcatggaggaggcctccttcgatggcactttcctgtggaagatcaccaatgtcaccaggcggtgccatgagtcggcctgtggcaggaccgtcagcctcttctccccagccttctacactgccaagtatggctacaagttgtgcctgcggctgtacctgaatggagatggcactggaaagagaacccatctgtcgctcttcatcgtgatcatgagaggggagtatgatgcgctgctgccgtggcccttccggaacaaggtcaccttcatgctgctggaccagaacaaccgtgagcacgccattgacgccttccggcctgacctaagctcagcgtccttccagaggccccagagtgaaaccaacgtggccagtggatgcccactcttcttccccctcagcaaactgcagtcacccaagcacgcctacgtgaaggacgacacaatgttcctcaagtgcattgtggagaccagcacttagggtgggcggggctcctgagggagctccaactcagaagggagctagccagaggactgtgatgccctgcccttggcacccaagacctcagggcacaaagatgggtgaaggctggcatgatccaagcaagactgaggggtcgacttcgggctggccatctggttaggatggcaggacgtgggctgggcccacaaaggcaaagggtccagaaggagacaggcagagctgctcccctctgcacggaccatgcgacactgggaggccagtgagccactccggccccgaatgttgaggtggactctcaccaaatgagaagaaaatggaaccaggcttggaaccgtaggacccaagcagagaagctctcgggctaggaagatctctgcagggccgccagggagacctggacacaggcctgctctctttttctccagggtcagaaacaggaccgggtggaagggatggggtgccagtttgaatgcagtctgtccaggctcgtcattggaggtgaacaagcaaacccagacggctccactaggacttcaaattgggggttggatttgaagacttttaagtttccttccagcccagaaagtctctcattctaggcctcctggcccaggtgagtcctagagctacaggggttctggaaacattcaggagcttcctgtcctcccagctcctcactcaccttcagtaacccccactggactgacctggtccacagggcacctgccaccctgggcctggcagctcagcttccccaacacgcaggagcacacccagcccccacatcctgtgcctccatcagctaaacaccacgtcacttcatgcaggtgaaacccagtcactgtgagctcccaggtgcagccagaggcacctcaagaagaagaggggcataaactttcctcttcctgcctagaggccccacctttggtgctttccagaatcccgtaacacctgattaactgaggcatccacttctttcagcagactgatcaggacctccaagccactgagcaatgtataaccccaaagaaataatttttagaatctctttcgaagttttcctaaagtgtatggtttgggagttgtttgtactgagccaggtttgaaaaggccattgctgagtttgaggtggtgccaccagttttgcaggtggcatcagaggctggcatgctggcaggaacatcccctcttagccccagtcttctcttttctataatgagacccaccccagcttgcctccctccctggcttctctgaccctcaaaggagatgccacgcaggacagactggagagagaagcctgggcaatactgcccgcctgtcatggcctggtggtggcccacacctatcttctcaccttggaggccacacccaactttccaaagaccctgagacaagtcaggaccctactactctcccctgctgctttcctgacagcttactcttcctccacctgctgagcctgtgccagactccattgctcaaatcgttagggttgcttctataaaaatgggtcagtagcccttcctgttctctccagcccagcatacaggaggatcaaaggaggtgacggagcatcgtggcacggcagtctcaatgggtcagaaacccaggccagctgggctctaagcctggcatcctgtcatgcttagtccttcagctgaagatcagaggaagcctctcccttgccctctccagctctaggggttttcaggaggcccaactgcaataatggagcactagtgcttttatgtgcaatggtgtcgtccatgcacgacagcagcaaacattctggggctgctttttattgttcccacggctgacagcgtggcagcggagactgtggaggcagtggagactgacttcttcctgctgacagctggatgtcacacatgaaggtctggcctagcgagtgatgggtctaggccctgaaactgatgtcctagcaataacctcttgatccctactcaccgagtgttgagcccaaggggggatttgtagaacaagcccccatgagaaacagctgttactctacacttttgattgcctatttctgatggcaagagatacatactctcttcaaagagcatgagatgcagccattctttcagcaaagcttcattgacacctgcacctgttaactgtgttcgacattgaagggagaaaggcaagatgtgcactctggactcaagaaactcttagttcagtggaggaaatgagcagataagtagatcattatgattgagagtaggagaagcttagagaaagcacagaatcccagatccagctggtgaaggagggaaggcttcaggcctttaagctcagcctgagaatattgtgaaatgcagaggatggggaaaagggaagagtaccgacttgaaaacggagagctgtcttggctgagggcagggtctgtgtggcaggatgggggagggagtcagaagggtcagatgaactggagtgtagacagcatcagatgcagcagtgcccaccgcccccccccccaccccccgccctgcccacagagcacctgctggtaaccctgggcctattgaaagcaggatgagatgataatttaagacactgaatgatttcttttccaacaaagctctatgttaagtgca

SEQ ID NO: 114 - DNA, 3220 bp, Homo sapiens
aaacttttttccctggctctgccctgggtttccccttgaagggatttccctccgcctctgcaacaagaccctttataaagcacagactttctatttcactccgcggtatctgcatcgggcctcactggcttcaggagctgaataccctcccaggcacacacaggtgggacacaaataagggttttggaaccactattttctcatcacgacagcaacttaaaatgcctgggaagatggtcgtgatccttggagcctcaaatatactttggataatgtttgcagcttctcaagcttttaaaatcgagaccaccccagaatctagatatcttgctcagattggtgactccgtctcattgacttgcagcaccacaggctgtgagtccccatttttctcttggagaacccagatagatagtccactgaatgggaaggtgacgaatgaggggaccacatctacgctgacaatgaatcctgttagttttgggaacgaacactcttacctgtgcacagcaacttgtgaatctaggaaattggaaaaaggaatccaggtggagatctactcttttcctaaggatccagagattcatttgagtggccctctggaggctgggaagccgatcacagtcaagtgttcagttgctgatgtatacccatttgacaggctggagatagacttactgaaaggagatcatctcatgaagagtcaggaatttctggaggatgcagacaggaagtccctggaaaccaagagtttggaagtaacctttactcctgtcattgaggatattggaaaagttcttgtttgccgagctaaattacacattgatgaaatggattctgtgcccacagtaaggcaggctgtaaaagaattgcaagtctacatatcacccaagaatacagttatttctgtgaatccatccacaaagctgcaagaaggtggctctgtgaccatgacctgttccagcgagggtctaccagctccagagattttctggagtaagaaattagataatgggaatctacagcacctttctggaaatgcaactctcaccttaattgctatgaggatggaagattctggaatttatgtgtgtgaaggagttaatttgattgggaaaaacagaaaagaggtggaattaattgttcaagagaaaccatttactgttgagatctcccctggaccccggattgctgctcagattggagactcagtcatgttgacatgtagtgtcatgggctgtgaatccccatctttctcctggagaacccagatagacagccctctgagcgggaaggtgaggagtgaggggaccaattccacgctgaccctgagccctgtgagttttgagaacgaacactcttatctgtgcacagtgacttgtggacataagaaactggaaaagggaatccaggtggagctctactcattccctagagatccagaaatcgagatgagtggtggcctcgtgaatgggagctctgtcactgtaagctgcaaggttcctagcgtgtacccccttgaccggctggagattgaattacttaagggggagactattctggagaatatagagtttttggaggatacggatatgaaatctctagagaacaaaagtttggaaatgaccttcatccctaccattgaagatactggaaaagctcttgtttgtcaggctaagttacatattgatgacatggaattcgaacccaaacaaaggcagagtacgcaaacactttatgtcaatgttgcccccagagatacaaccgtcttggtcagcccttcctccatcctggaggaaggcagttctgtgaatatgacatgcttgagccagggctttcctgctccgaaaatcctgtggagcaggcagctccctaacggggagctacagcctctttctgagaatgcaactctcaccttaatttctacaaaaatggaagattctggggtttatttatgtgaaggaattaaccaggctggaagaagcagaaaggaagtggaattaattatccaagttactccaaaagacataaaacttacagcttttccttctgagagtgtcaaagaaggagacactgtcatcatctcttgtacatgtggaaatgttccagaaacatggataatcctgaagaaaaaagcggagacaggagacacagtactaaaatctatagatggcgcctataccatccgaaaggcccagttgaaggatgcgggagtatatgaatgtgaatctaaaaacaaagttggctcacaattaagaagtttaacacttgatgttcaaggaagagaaaacaacaaagactatttttctcctgagcttctcgtgctctattttgcatcctccttaataatacctgccattggaatgataatttactttgcaagaaaagccaacatgaaggggtcatatagtcttgtagaagcacagaagtcaaaagtgtagctaatgcttgatatgttcaactggagacactatttatctgtgcaaatccttgatactgctcatcattccttgagaaaaacaatgagctgagaggcagacttccctgaatgtattgaacttggaaagaaatgcccatctatgtcccttgctgtgagcaagaagtcaaagtaaaacttgctgcctgaagaacagtaactgccatcaagatgagagaactggaggagttccttgatctgtatatacaataacataatttgtacatatgtaaaataaaattatgccatagcaagattgcttaaaatagcaacactctatatttagattgttaaaataactagtgttgcttggactattataatttaatgcatgttaggaaaatttcacattaatatttgctgacagctgacctttgtcatctttcttctattttattccctttcacaaaattttattcctatatagtttattgacaataatttcaggttttgtaaagatgccgggttttatatttttatagacaaataataagcaaagggagcactgggttgactttcaggtactaaatacctcaacctatggtataatggttgactgggtttctctgtatagtactggcatggtacggagatgtttcacgaagtttgttcatcagactcctgtgcaactttcccaatgtggcctaaaaatgcaacttctttttattttcttttgtaaatgtttaggtttttttgtatagtaaagtgataatttctggaattagaaaaaaaaaaaaaaaaaaa

SEQ ID NO: 115 - DNA, 5106 bp, Homo sapiens
acttcgctccgcgcagccgcctggtctgcagtttgttggagctctgcgtccagcgccgctgccgctgccgccgccgccgccgccgccgccgccgccgccgccgccgccactaccaccacttgattcttgcagccaccctgcgaaccctgccacactgcgatcgcatcatcgcggtattcggttcgctgcgttcccgccgccaccgcctcggcgccctttcttggcccttgttcccccaaatgtctgactctgactctcggactgagaaacgcaagaaaaaaagaccaaatggcaaagcaaccttctgatgtaagttctgagtgtgaccgagaaggtagacaattgcagcctgcggagaggcctccccagctcagacctggggcccctacctccctacagacagagccacaaggtaatcctgaaggcaatcacggaggtgaaggggacagctgcccccacggcagccctcagggcccgctggccccacctgccagccctggcccttttgctaccagatccccgcttttcatctttatgagaagatcctccctgctgtctcgatcctccagtgggtatttctcttttgacacagacaggagcccagcacccatgagttgtgacaaatcaacacaaaccccaagtcctccttgccaggccttcaaccactatctcagtgcaatggcttccatgaggcaggctgaacctgcagatatgcgcccagagatatggatcgcccaagagttgcggcgtattggagacgagtttaacgcttactatgcaaggagggtatttttgaataattaccaagcagccgaagaccacccacgaatggttatcttacgactgttacgttacattgtccgcctggtgtggagaatgcattgacaggttctttgcggagccgagataccatgcagacattttgcttgttcaaaccaacaagacccagcaccgcggtctcctggtgccattattatgcagccagcggttctcttgtggagggggcaggtgacgtttcagaagacaccgagctggatgggactacctttctgttcatcaccacacagcagaatttctaatggaagtttgttgtgaatgtaaaggagggagcattctttgctttttaatatacaaaccatggttttttggagcaggattttgtgtaagaatggtgtttacatgcagtgtgttttccccctcaccttcaataaggtttttcaaaaaggaaatggaaactttttaaccaatttgtgaataacttttgtattaaaattttaagaacctacggcctattctcagaggattatgtaacccctgcagtggaaactgagccagctaacttaaaaagctgccttagtttatttttagagattacagaatttttaaacagggagacgtgtgatatactccctcccttccctactattgcctctctgacctttttaaattatttttaataccaaaagagttcttttgaaatggaactgattaaaagggcagagggtctgttgccagcctgcattgatataccagtcccatttgtaaatatttacgtacctttataaattcagttgcatctgtggcaaaatttcagactatttttgcgtctttcctcatcactttttgtgatgcaactccagtctggactcagatgcatagatttggtccagtgtattttcatgataaagtgaaattgagtcagaacaagagttaatatctgcctgtatcttgcacagttcgagcgatctgttattaactgggaagcatttggtgttggttttcattccatttcgacgagcatgttattgggaagtattctgaagaggcaatagcagtaataacaacagacttaagtgctacgcccctttgtgctgctggcttttctggttgcaggctttcccatggtcacaggatgcactgtcagcatcaggtcccagagggccaccgtgtccattacagcagagtccagctgcagcatccagctcacgccctcatgggaattggcacaggcctggggcagggcttctgatggccatttgcttggcctcctgcattttagtccaactcacagtccactagcttcactcctttaaattcactttgaaacaggcctcatcccacttccaccagcaccatagaagaataattctgggcagaagtctgttttttttcatttttccaggacagttggatattgtcaggccacttgtgaccccagccatgtagtgagggtgctctttctctgtgcctgctccttatgagtgcagtggaaggaagccacacactggtcagtcatttcagaggcagcagatgcccagggagacccaagaaagagtcaggttagggagcagtgaaagtgaggagggaagacaattctgtgaactctgtaactcttaaaatttttgaaaactccatcgttaaacaacttttaaaagaaataactaaattttcaaatgagtaagcagtgccaccaactagtgttttgcccgatagaagagccagcatgttcacgttatttaaattaggtggaaaaatctaaacatttttatcttcataatttaaaaaatatatatgtatatattgcatattcactttttcctttaggtagagatgatttcaatccaaatactcttactttaaaaaatttcctttccccaagaatctccttgggactttgacttatttttaaagctgtgttggagctcatcttgttccctgatgtgtctcgagcccattggtagggtcatacaaagcccacggttacaagcagtggtaggattgcagccgtgggcctgctggacacacacatacaccaaagatgtatttggatctgggcaccccctcccaggatccctgtactcacgtgccagtctcctgactagagcactttactctgtttcctcagccctgcagcccctgggagcacacactgggtgcagccctgggccaggcacgggaggccctgccctgtgctgcccaggggctgtgtgcaccacatgagcacatttccctctggcctggcggcctccaggctggctgtggaaacagttcctgaggaaattagagattctatgaattgtaggagtattaaagaccaggctgttggcaccagaacttaaagcgatgactggatgtctctgtactgtatgtatctggttatcaagatgcctctgtgcagaaagtatgcctcccgtgggtatacgtttttaccttttttaaaaaacatttttgtagaaaaaataattaaatcccctttttggaaacttactgcaggttttgtgccttgacaacctctccctatgtgaggtttgtaaaaagtgtcctgtgacttaacacagaaacgcaataaacacacacaaaatagtttcatgagtgattcttcagatgcccttcccaactggttagttgatcaagaattttgggggtgggggttgcggagaaatcaagtttaaaattccttctgattaaaaaaatatagtggaatacaattgtctgccgtttccccttcttaatgtatatattgtgagtatttattagattcgtaggtcatattacttatcaactgagccaaatgtctgtgtgcaattgtgtttcctttaccttgtaaaattttgtacagcataaataagtaaaaaaatcactgtttttctcaactttttcaaaatcaaggattgtaaatattgtagattctttttctgtgtgatgtgtcctactgtttcataatgctgtaacttgtagaaatattgtatatttattttctgcttatttaatgtcttaatttctgaaaagtattaacatccctgtctcccactcccctgccgtcccatgaagttaactcctgagagttgtcgggggtgactggagagctcattgcagaccacgtggtcctccagggtggctctccaccttcgggtcctggtatttccagtcaagtgggtttcaattcttgggctttgccgcccttatgatgaagtgtgtgtttgatgccagtgagaaactcagtctggcaggctacaaaattctactccaagaaatacccagcaaccttctgtttgttccaaagcaactagcttatcatgcaagcaaattttgctgactccaggctttatctttaggaaaacaaaaaaaccaaagtattatcagcaggtgggaaagatttttctattgaaaatttatccctgacaactcagcgtttagaaaagaaataaaatgtgccacttccagaggtgctgcattgcagttgttcagggctagggccaggcaggacaagtgaatgggtgggacaggtggctcctgcctaaggaccacctcaggccactaaccccttgtggacaactgtgagtagctgggttttcccccacctgctgtgcaacttcctgtgctttgaggttggactaacttgtcttcaggagctaattaactgtacagccctccccacgccccacccatacggtcactgcatttggtcagcctgcttcttcaggtcgatgccctccttctgatactccatctccttcaggggaggttggggccccactggactgggtgtcaagatgtgaaagcttatgggagctttaaggagacttcatggtggttccatgcaggtggttctgccatccctgctgatttagcctggtgcctgtgtgtgtccactcacgtacacgtggggtgggggaaacgtgtctacagatgacgctaaatcagttggggtctactctaaacagcattgtgtgtaagaagcatcctcaagctcccagttaagtaacttgactacttttatttgggaatttcagactatagaagctctcttatgttttatgtccagattctgtgaccactagttactgtatcagaactcatcaggtacccacttataaatagcactgatctggctgtatactgatccatcactaacctgttttctaggacccagcgtatgtagcatttgtattgcagtttccctggcttacttgtgttttgcactgatgaattttgacagggtaattgccactttacttgtgcaatactgctgtaaataactgcagatttttaaacaatcttttatgttaattttataaaaataaaactttcaactagttaaaaaaa

SEQ ID NO: 116 - DNA, 4304 bp, Homo sapiens
cacacggactacaggggagttttgttgaagttgcaaagtcctggagcctccagagggctgtcggcgcagtagcagcgagcagcagagtccgcacgctccggcgaggggcagaagagcgcgagggagcgcggggcagcagaagcgagagccgagcgcggacccagccaggacccacagccctccccagctgcccaggaagagccccagccatggaacaccagctcctgtgctgcgaagtggaaaccatccgccgcgcgtaccccgatgccaacctcctcaacgaccgggtgctgcgggccatgctgaaggcggaggagacctgcgcgccctcggtgtcctacttcaaatgtgtgcagaaggaggtcctgccgtccatgcggaagatcgtcgccacctggatgctggaggtctgcgaggaacagaagtgcgaggaggaggtcttcccgctggccatgaactacctggaccgcttcctgtcgctggagcccgtgaaaaagagccgcctgcagctgctgggggccacttgcatgttcgtggcctctaagatgaaggagaccatccccctgacggccgagaagctgtgcatctacaccgacaactccatccggcccgaggagctgctgcaaatggagctgctcctggtgaacaagctcaagtggaacctggccgcaatgaccccgcacgatttcattgaacacttcctctccaaaatgccagaggcggaggagaacaaacagatcatccgcaaacacgcgcagaccttcgttgccctctgtgccacagatgtgaagttcatttccaatccgccctccatggtggcagcggggagcgtggtggccgcagtgcaaggcctgaacctgaggagccccaacaacttcctgtcctactaccgcctcacacgcttcctctccagagtgatcaagtgtgacccggactgcctccgggcctgccaggagcagatcgaagccctgctggagtcaagcctgcgccaggcccagcagaacatggaccccaaggccgccgaggaggaggaagaggaggaggaggaggtggacctggcttgcacacccaccgacgtgcgggacgtggacatctgagggcgccaggcaggcgggcgccaccgccacccgcagcgagggcggagccggccccaggtgctcccctgacagtccctcctctccggagcattttgataccagaagggaaagcttcattctccttgttgttggttgttttttcctttgctctttcccccttccatctctgacttaagcaaaagaaaaagattacccaaaaactgtctttaaaagagagagagagaaaaaaaaaatagtatttgcataaccctgagcggtgggggaggagggttgtgctacagatgatagaggattttataccccaataatcaactcgtttttatattaatgtacttgtttctctgttgtaagaataggcattaacacaaaggaggcgtctcgggagaggattaggttccatcctttacgtgtttaaaaaaaagcataaaaacattttaaaaacatagaaaaattcagcaaaccatttttaaagtagaagagggttttaggtagaaaaacatattcttgtgcttttcctgataaagcacagctgtagtggggttctaggcatctctgtactttgcttgctcatatgcatgtagtcactttataagtcattgtatgttattatattccgtaggtagatgtgtaacctcttcaccttattcatggctgaagtcacctcttggttacagtagcgtagcgtgcccgtgtgcatgtcctttgcgcctgtgaccaccaccccaacaaaccatccagtgacaaaccatccagtggaggtttgtcgggcaccagccagcgtagcagggtcgggaaaggccacctgtcccactcctacgatacgctactataaagagaagacgaaatagtgacataatatattctatttttatactcttcctatttttgtagtgacctgtttatgagatgctggttttctacccaacggccctgcagccagctcacgtccaggttcaacccacagctacttggtttgtgttcttcttcatattctaaaaccattccatttccaagcactttcagtccaataggtgtaggaaatagcgctgtttttgttgtgtgtgcagggagggcagttttctaatggaatggtttgggaatatccatgtacttgtttgcaagcaggactttgaggcaagtgtgggccactgtggtggcagtggaggtggggtgtttgggaggctgcgtgccagtcaagaagaaaaaggtttgcattctcacattgccaggatgataagttcctttccttttctttaaagaagttgaagtttaggaatcctttggtgccaactggtgtttgaaagtagggacctcagaggtttacctagagaacaggtggtttttaagggttatcttagatgtttcacaccggaaggtttttaaacactaaaatatataatttatagttaaggctaaaaagtatatttattgcagaggatgttcataaggccagtatgatttataaatgcaatctccccttgatttaaacacacagatacacacacacacacacacacacacaaaccttctgcctttgatgttacagatttaatacagtttatttttaaagatagatccttttataggtgagaaaaaaacaatctggaagaaaaaaaccacacaaagacattgattcagcctgtttggcgtttcccagagtcatctgattggacaggcatgggtgcaaggaaaattagggtactcaacctaagttcggttccgatgaattcttatcccctgccccttcctttaaaaaacttagtgacaaaatagacaatttgcacatcttggctatgtaattcttgtaatttttatttaggaagtgttgaagggaggtggcaagagtgtggaggctgacgtgtgagggaggacaggcgggaggaggtgtgaggaggaggctcccgaggggaaggggcggtgcccacaccggggacaggccgcagctccattttcttattgcgctgctaccgttgacttccaggcacggtttggaaatattcacatcgcttctgtgtatctctttcacattgtttgctgctattggaggatcagttttttgttttacaatgtcatatactgccatgtactagttttagttttctcttagaacattgtattacagatgccttttttgtagttttttttttttttatgtgatcaattttgacttaatgtgattactgctctattccaaaaaggttgctgtttcacaatacctcatgcttcacttagccatggtggacccagcgggcaggttctgcctgctttggcgggcagacacgcgggcgcgatcccacacaggctggcgggggccggccccgaggccgcgtgcgtgagaaccgcgccggtgtccccagagaccaggctgtgtccctcttctcttccctgcgcctgtgatgctgggcacttcatctgatcgggggcgtagcatcatagtagtttttacagctgtgttattctttgcgtgtagctatggaagttgcataattattattattattattataacaagtgtgtcttacgtgccaccacggcgttgtacctgtaggactctcattcgggatgattggaatagcttctggaatttgttcaagttttgggtatgtttaatctgttatgtactagtgttctgtttgttattgttttgttaattacaccataatgctaatttaaagagactccaaatctcaatgaagccagctcacagtgctgtgtgccccggtcacctagcaagctgccgaaccaaaagaatttgcaccccgctgcgggcccacgtggttggggccctgccctggcagggtcatcctgtgctcggaggccatctcgggcacaggcccaccccgccccacccctccagaacacggctcacgcttacctcaaccatcctggctgcggcgtctgtctgaaccacgcgggggccttgagggacgctttgtctgtcgtgatggggcaagggcacaagtcctggatgttgtgtgtatcgagaggccaaaggctggtggcaagtgcacggggcacagcggagtctgtcctgtgacgcgcaagtctgagggtctgggcggcgggcggctgggtctgtgcatttctggttgcaccgcggcgcttcccagcaccaacatgtaaccggcatgtttccagcagaagacaaaaagacaaacatgaaagtctagaaataaaactggtaaaaccccaaaaaaaaaaaaaaaa

SEQ ID NO: 117 - DNA, 924 bp, Homo sapiens
gaggtcagagacttaagtctaaggcactgagcgtatcatgttaaagatgagcgggtggcagcgacagagccaaaatcagagctggaacctgaggagagagtgttcaagaaggaagtgtatcttcatacatcaccacacctgaaagcagatgtgcttttccagactgatccaactgcagagatggcagctgagtcattgcctttctccttcgggacactgtccagctgggagctggaagcctggtatgaggacctgcaagaggtcctgtcttcagatgaaaatgggggtacctatgtttcacctcctggaaatgaagaggaagaatcaaaaatcttcaccactcttgaccctgcttctctggcttggctgactgaggaggagccagaaccagcagaggtcacaagcacctcccagagccctcactctccagattccagtcagagctccctggctcaggaggaagaggaggaagaccaagggagaaccaggaaacggaaacagagtggtcattccccagcccgggctggaaagcagcgcatgaaggagaaagaacaggagaatgaaaggaaagtggcacagctagctgaagagaatgaacggctcaagcaggaaatcgagcgcctgaccagggaagtagaggcgactcgccgagctctgattgaccgaatggtgaatctgcaccaagcatgaacaattgggagcatcagtcccccacttgggccacactacccacctttcccagaagtggctactgactaccctctcactagtgccaatgatgtgaccctcaatcccacatacgcagggggaaggcttggagtagacaaaaggaaaggtctcagcttgtatatagagattgtacatttatttattactgtccctatctattaaagtgactttctatgagccaaaaaaaaaaaaaaa

SEQ ID NO: 118 - DNA, 5422 bp, Homo sapiens
tccgcgtggggggggtgtgtgcccgccttgcgcatgcgtgttccctgggcatggccggctccgttccatccttctgcacagggtatcgcctctctccgtttggtacatcccctcctcccccacgcccggactggggtggtagacgccgcctccgctcatcgcccctccccatcggtttccgcgcgaaaagccggggcgcctgcgctgccgccgccgcgtctgctgaagcctccgagatgccggcgcgtaccgccccagcccgggtgcccacactggccgtcccggccatctcgctgcccgacgatgtccgcaggcggctcaaagatttggaaagagacagcttaacagaaaaggaatgtgtgaaggagaaattgaatctcttgcacgaatttctgcaaacagaaataaagaatcagttatgtgacttggaaaccaaattacgtaaagaagaattatccgaggagggctacctggctaaagtcaaatcccttttaaataaagatttgtccttggagaacggtgctcatgcttacaaccgggaagtgaatggacgtctagaaaacgggaaccaagcaagaagtgaagcccgtagagtgggaatggcagatgccaacagcccccccaaacccctttccaaacctcgcacgcccaggaggagcaagtccgatggagaggctaagcctgaaccttcacctagccccaggattacaaggaaaagcaccaggcaaaccaccatcacatctcattttgcaaagggccctgccaaacggaaacctcaggaagagtctgaaagagccaaatcggatgagtccatcaaggaagaagacaaagaccaggatgagaagagacgtagagttacatccagagaacgagttgctagaccgcttcctgcagaagaacctgaaagagcaaaatcaggaacgcgcactgaaaaggaagaagaaagagatgaaaaagaagaaaagagactccgaagtcaaaccaaagaaccaacacccaaacagaaactgaaggaggagccggacagagaagccagggcaggcgtgcaggctgacgaggacgaagatggagacgagaaagatgagaagaagcacagaagtcaacccaaagatctagctgccaaacggaggcccgaagaaaaagaacctgaaaaagtaaatccacagatttctgatgaaaaagacgaggatgaaaaggaggagaagagacgcaaaacgacccccaaagaaccaacggagaaaaaaatggctcgcgccaaaacagtcatgaactccaagacccaccctcccaagtgcattcagtgcgggcagtacctggacgaccctgacctcaaatatgggcagcacccaccagacgcggtggatgagccacagatgctgacaaatgagaagctgtccatctttgatgccaacgagtctggctttgagagttatgaggcgcttccccagcacaaactgacctgcttcagtgtgtactgtaagcacggtcacctgtgtcccatcgacaccggcctcatcgagaagaatatcgaactcttcttttctggttcagcaaaaccaatctatgatgatgacccatctcttgaaggtggtgttaatggcaaaaatcttggccccataaatgaatggtggatcactggctttgatggaggtgaaaaggccctcatcggcttcagcacctcatttgccgaatacattctgatggatcccagtcccgagtatgcgcccatatttgggctgatgcaggagaagatctacatcagcaagattgtggtggagttcctgcagagcaattccgactcgacctatgaggacctgatcaacaagatcgagaccacggttcctccttctggcctcaacttgaaccgcttcacagaggactccctcctgcgacacgcgcagtttgtggtggagcaggtggagagttatgacgaggccggggacagtgatgagcagcccatcttcctgacaccctgcatgcgggacctgatcaagctggctggggtcacgctgggacagaggcgagcccaggcgaggcggcagaccatcaggcattctaccagggagaaggacaggggacccacgaaagccaccaccaccaagctggtctaccagatcttcgatactttcttcgcagagcaaattgaaaaggatgacagagaagacaaggagaacgcctttaagcgccggcgatgtggcgtctgtgaggtgtgtcagcagcctgagtgtgggaaatgtaaagcctgcaaggacatggttaaatttggtggcagtggacggagcaagcaggcttgccaagagcggaggtgtcccaatatggccatgaaggaggcagatgacgatgaggaagtcgatgataacatcccagagatgccgtcacccaaaaaaatgcaccaggggaagaagaagaaacagaacaagaatcgcatctcttgggtcggagaagccgtcaagactgatgggaagaagagttactataagaaggtgtgcattgatgcggaaaccctggaagtgggggactgtgtctctgttattccagatgattcctcaaaaccgctgtatctagcaagggtcacggcgctgtgggaggacagcagcaacgggcagatgtttcacgcccactggttctgcgctgggacagacacagtcctcggggccacgtcggaccctctggagctgttcttggtggatgaatgtgaggacatgcagctttcatatatccacagcaaagtgaaagtcatctacaaagccccctccgaaaactgggccatggagggaggcatggatcccgagtccctgctggagggggacgacgggaagacctacttctaccagctgtggtatgatcaagactacgcgagattcgagtcccctccaaaaacccagccaacagaggacaacaagttcaaattctgtgtgagctgtgcccgtctggctgagatgaggcaaaaagaaatccccagggtcctggagcagctcgaggacctggatagccgggtcctctactactcagccaccaagaacggcatcctgtaccgagttggtgatggtgtgtacctgccccctgaggccttcacgttcaacatcaagctgtccagtcccgtgaaacgcccacggaaggagcccgtggatgaggacctgtacccagagcactaccggaaatactccgactacatcaaaggcagcaacctggatgcccctgagccctaccgaattggccggatcaaagagatcttctgtcccaagaagagcaacggcaggcccaatgagactgacatcaaaatccgggtcaacaagttctacaggcctgagaacacccacaagtccactccagcgagctaccacgcagacatcaacctgctctactggagcgacgaggaggccgtggtggacttcaaggctgtgcagggccgctgcaccgtggagtatggggaggacctgcccgagtgcgtccaggtgtactccatgggcggccccaaccgcttctacttcctcgaggcctataatgcaaagagcaaaagctttgaagatcctcccaaccatgcccgtagccctggaaacaaagggaagggcaagggaaaagggaagggcaagcccaagtcccaagcctgtgagccgagcgagccagagatagagatcaagctgcccaagctgcggaccctggatgtgttttctggctgcggggggttgtcggagggattccaccaagcaggcatctctgacacgctgtgggccatcgagatgtgggaccctgcggcccaggcgttccggctgaacaaccccggctccacagtgttcacagaggactgcaacatcctgctgaagctggtcatggctggggagaccaccaactcccgcggccagcggctgccccagaagggagacgtggagatgctgtgcggcgggccgccctgccagggcttcagcggcatgaaccgcttcaattcgcgcacctactccaagttcaaaaactctctggtggtttccttcctcagctactgcgactactaccggccccggttcttcctcctggagaatgtcaggaactttgtctccttcaagcgctccatggtcctgaagctcaccctccgctgcctggtccgcatgggctatcagtgcaccttcggcgtgctgcaggccggtcagtacggcgtggcccagactaggaggcgggccatcatcctggccgcggcccctggagagaagctccctctgttcccggagccactgcacgtgtttgctccccgggcctgccagctgagcgtggtggtggatgacaagaagtttgtgagcaacataaccaggttgagctcgggtcctttccggaccatcacggtgcgagacacgatgtccgacctgccggaggtgcggaatggagcctcggcactggagatctcctacaacggggagcctcagtcctggttccagaggcagctccggggcgcacagtaccagcccatcctcagggaccacatctgtaaggacatgagtgcattggtggctgcccgcatgcggcacatccccttggccccagggtcagactggcgcgatctgcccaacatcgaggtgcggctctcagacggcaccatggccaggaagctgcggtatacccaccatgacaggaagaacggccgcagcagctctggggccctccgtggggtctgctcctgcgtggaagccggcaaagcctgcgaccccgcagccaggcagttcaacaccctcatcccctggtgcctgccccacaccgggaaccggcacaaccactgggctggcctctatggaaggctcgagtgggacggcttcttcagcacaaccgtcaccaaccccgagcccatgggcaagcagggccgcgtgctccacccagagcagcaccgtgtggtgagcgtgcgggagtgtgcccgctcccagggcttccctgacacctaccggctcttcggcaacatcctggacaagcaccggcaggtgggcaatgccgtgccaccgcccctggccaaagccattggcttggagatcaagctttgtatgttggccaaagcccgagagagtgcctcagctaaaataaaggaggaggaagctgctaaggactagttctgccctcccgtcacccctgtttctggcaccaggaatccccaacatgcactgatgttgtgtttttaacatgtcaatctgtccgttcacatgtgtggtacatggtgtttgtggccttggctgacatgaagctgttgtgtgaggttcgcttatcaactaatgatttagtgatcaaattgtgcagtactttgtgcattctggattttaaaagttttttattatgcattatatcaaatctaccactgtatgagtggaaattaagactttatgtagtttttatatgttgtaatatttcttcaaataaatctctcctataaaccaccaaaaaaaaaaaa

SEQ ID NO: 119 - DNA, 6369 bp, Homo sapiens
gtccgggcagcccccggcgcagcgcggccgcagcagcctccgccccccgcacggtgtgagcgcccgacgcggccgaggcggccggagtcccgagctagccccggcggccgccgccgcccagaccggacgacaggccacctcgtcggcgtccgcccgagtccccgcctcgccgccaacgccacaaccaccgcgcacggccccctgactccgtccagtattgatcgggagagccggagcgagctcttcggggagcagcgatgcgaccctccgggacggccggggcagcgctcctggcgctgctggctgcgctctgcccggcgagtcgggctctggaggaaaagaaagtttgccaaggcacgagtaacaagctcacgcagttgggcacttttgaagatcattttctcagcctccagaggatgttcaataactgtgaggtggtccttgggaatttggaaattacctatgtgcagaggaattatgatctttccttcttaaagaccatccaggaggtggctggttatgtcctcattgccctcaacacagtggagcgaattcctttggaaaacctgcagatcatcagaggaaatatgtactacgaaaattcctatgccttagcagtcttatctaactatgatgcaaataaaaccggactgaaggagctgcccatgagaaatttacaggaaatcctgcatggcgccgtgcggttcagcaacaaccctgccctgtgcaacgtggagagcatccagtggcgggacatagtcagcagtgactttctcagcaacatgtcgatggacttccagaaccacctgggcagctgccaaaagtgtgatccaagctgtcccaatgggagctgctggggtgcaggagaggagaactgccagaaactgaccaaaatcatctgtgcccagcagtgctccgggcgctgccgtggcaagtcccccagtgactgctgccacaaccagtgtgctgcaggctgcacaggcccccgggagagcgactgcctggtctgccgcaaattccgagacgaagccacgtgcaaggacacctgccccccactcatgctctacaaccccaccacgtaccagatggatgtgaaccccgagggcaaatacagctttggtgccacctgcgtgaagaagtgtccccgtaattatgtggtgacagatcacggctcgtgcgtccgagcctgtggggccgacagctatgagatggaggaagacggcgtccgcaagtgtaagaagtgcgaagggccttgccgcaaagtgtgtaacggaataggtattggtgaatttaaagactcactctccataaatgctacgaatattaaacacttcaaaaactgcacctccatcagtggcgatctccacatcctgccggtggcatttaggggtgactccttcacacatactcctcctctggatccacaggaactggatattctgaaaaccgtaaaggaaatcacagggtttttgctgattcaggcttggcctgaaaacaggacggacctccatgcctttgagaacctagaaatcatacgcggcaggaccaagcaacatggtcagttttctcttgcagtcgtcagcctgaacataacatccttgggattacgctccctcaaggagataagtgatggagatgtgataatttcaggaaacaaaaatttgtgctatgcaaatacaataaactggaaaaaactgtttgggacctccggtcagaaaaccaaaattataagcaacagaggtgaaaacagctgcaaggccacaggccaggtctgccatgccttgtgctcccccgagggctgctggggcccggagcccagggactgcgtctcttgccggaatgtcagccgaggcagggaatgcgtggacaagtgcaaccttctggagggtgagccaagggagtttgtggagaactctgagtgcatacagtgccacccagagtgcctgcctcaggccatgaacatcacctgcacaggacggggaccagacaactgtatccagtgtgcccactacattgacggcccccactgcgtcaagacctgcccggcaggagtcatgggagaaaacaacaccctggtctggaagtacgcagacgccggccatgtgtgccacctgtgccatccaaactgcacctacggatgcactgggccaggtcttgaaggctgtccaacgaatgggcctaagatcccgtccatcgccactgggatggtgggggccctcctcttgctgctggtggtggccctggggatcggcctcttcatgcgaaggcgccacatcgttcggaagcgcacgctgcggaggctgctgcaggagagggagcttgtggagcctcttacacccagtggagaagctcccaaccaagctctcttgaggatcttgaaggaaactgaattcaaaaagatcaaagtgctgggctccggtgcgttcggcacggtgtataagggactctggatcccagaaggtgagaaagttaaaattcccgtcgctatcaaggaattaagagaagcaacatctccgaaagccaacaaggaaatcctcgatgaagcctacgtgatggccagcgtggacaacccccacgtgtgccgcctgctgggcatctgcctcacctccaccgtgcagctcatcacgcagctcatgcccttcggctgcctcctggactatgtccgggaacacaaagacaatattggctcccagtacctgctcaactggtgtgtgcagatcgcaaagggcatgaactacttggaggaccgtcgcttggtgcaccgcgacctggcagccaggaacgtactggtgaaaacaccgcagcatgtcaagatcacagattttgggctggccaaactgctgggtgcggaagagaaagaataccatgcagaaggaggcaaagtgcctatcaagtggatggcattggaatcaattttacacagaatctatacccaccagagtgatgtctggagctacggggtgactgtttgggagttgatgacctttggatccaagccatatgacggaatccctgccagcgagatctcctccatcctggagaaaggagaacgcctccctcagccacccatatgtaccatcgatgtctacatgatcatggtcaagtgctggatgatagacgcagatagtcgcccaaagttccgtgagttgatcatcgaattctccaaaatggcccgagacccccagcgctaccttgtcattcagggggatgaaagaatgcatttgccaagtcctacagactccaacttctaccgtgccctgatggatgaagaagacatggacgacgtggtggatgccgacgagtacctcatcccacagcagggcttcttcagcagcccctccacgtcacggactcccctcctgagctctctgagtgcaaccagcaacaattccaccgtggcttgcattgatagaaatgggctgcaaagctgtcccatcaaggaagacagcttcttgcagcgatacagctcagaccccacaggcgccttgactgaggacagcatagacgacaccttcctcccagtgcctgaatacataaaccagtccgttcccaaaaggcccgctggctctgtgcagaatcctgtctatcacaatcagcctctgaaccccgcgcccagcagagacccacactaccaggacccccacagcactgcagtgggcaaccccgagtatctcaacactgtccagcccacctgtgtcaacagcacattcgacagccctgcccactgggcccagaaaggcagccaccaaattagcctggacaaccctgactaccagcaggacttctttcccaaggaagccaagccaaatggcatctttaagggctccacagctgaaaatgcagaatacctaagggtcgcgccacaaagcagtgaatttattggagcatgaccacggaggatagtatgagccctaaaaatccagactctttcgatacccaggaccaagccacagcaggtcctccatcccaacagccatgcccgcattagctcttagacccacagactggttttgcaacgtttacaccgactagccaggaagtacttccacctcgggcacattttgggaagttgcattcctttgtcttcaaactgtgaagcatttacagaaacgcatccagcaagaatattgtccctttgagcagaaatttatctttcaaagaggtatatttgaaaaaaaaaaaaagtatatgtgaggatttttattgattggggatcttggagtttttcattgtcgctattgatttttacttcaatgggctcttccaacaaggaagaagcttgctggtagcacttgctaccctgagttcatccaggcccaactgtgagcaaggagcacaagccacaagtcttccagaggatgcttgattccagtggttctgcttcaaggcttccactgcaaaacactaaagatccaagaaggccttcatggccccagcaggccggatcggtactgtatcaagtcatggcaggtacagtaggataagccactctgtcccttcctgggcaaagaagaaacggaggggatggaattcttccttagacttacttttgtaaaaatgtccccacggtacttactccccactgatggaccagtggtttccagtcatgagcgttagactgacttgtttgtcttccattccattgttttgaaactcagtatgctgcccctgtcttgctgtcatgaaatcagcaagagaggatgacacatcaaataataactcggattccagcccacattggattcatcagcatttggaccaatagcccacagctgagaatgtggaatacctaaggatagcaccgcttttgttctcgcaaaaacgtatctcctaatttgaggctcagatgaaatgcatcaggtcctttggggcatagatcagaagactacaaaaatgaagctgctctgaaatctcctttagccatcaccccaaccccccaaaattagtttgtgttacttatggaagatagttttctccttttacttcacttcaaaagctttttactcaaagagtatatgttccctccaggtcagctgcccccaaaccccctccttacgctttgtcacacaaaaagtgtctctgccttgagtcatctattcaagcacttacagctctggccacaacagggcattttacaggtgcgaatgacagtagcattatgagtagtgtggaattcaggtagtaaatatgaaactagggtttgaaattgataatgctttcacaacatttgcagatgttttagaaggaaaaaagttccttcctaaaataatttctctacaattggaagattggaagattcagctagttaggagcccaccttttttcctaatctgtgtgtgccctgtaacctgactggttaacagcagtcctttgtaaacagtgttttaaactctcctagtcaatatccaccccatccaatttatcaaggaagaaatggttcagaaaatattttcagcctacagttatgttcagtcacacacacatacaaaatgttccttttgcttttaaagtaatttttgactcccagatcagtcagagcccctacagcattgttaagaaagtatttgatttttgtctcaatgaaaataaaactatattcatttccactctattatgctctcaaatacccctaagcatctatactagcctggtatgggtatgaaagatacaaagataaataaaacatagtccctgattctaagaaattcacaatttagcaaaggaaatggactcatagatgctaaccttaaaacaacgtgacaaatgccagacaggacccatcagccaggcactgtgagagcacagagcagggaggttgggtcctgcctgaggagacctggaagggaggcctcacaggaggatgaccaggtctcagtcagcggggaggtggaaagtgcaggtgcatcaggggcaccctgaccgaggaaacagctgccagaggcctccactgctaaagtccacataaggctgaggtcagtcaccctaaacaacctgctccctctaagccaggggatgagcttggagcatcccacaagttccctaaaagttgcagcccccagggggattttgagctatcatctctgcacatgcttagtgagaagactacacaacatttctaagaatctgagattttatattgtcagttaaccactttcattattcattcacctcaggacatgcagaaatatttcagtcagaactgggaaacagaaggacctacattctgctgtcacttatgtgtcaagaagcagatgatcgatgaggcaggtcagttgtaagtgagtcacattgtagcattaaattctagtatttttgtagtttgaaacagtaacttaataaaagagcaaaagctaaaaaaaaaaaaaaaaa

SEQ ID NO: 120 - DNA, 3278 bp, Homo sapiens
aatagactaaacccagagcctcaaagcagtgcactccgtgaaggcaaagagaacacgctgcaaaaggctttccaagaatcctcgacatggcaaggaggagctcgttccagtcgtgtcagataatatccctgttcacttttgccgttggagtcaatatctgcttaggattcactgcacatcgaattaagagagcagaaggatgggaggaaggtcctcctacagtgctatcagactccccctggaccaacatctccggatcttgcaagggcaggtgctttgaacttcaagaggctggacctcctgattgtcgctgtgacaacttgtgtaagagctataccagttgctgccatgactttgatgagctgtgtttgaagacagcccgtggctgggagtgtactaaggacagatgtggagaagtcagaaatgaagaaaatgcctgtcactgctcagaggactgcttggccaggggagactgctgtaccaattaccaagtggtttgcaaaggagagtcgcattgggttgatgatgactgtgaggaaataaaggccgcagaatgccctgcagggtttgttcgccctccattaatcatcttctccgtggatggcttccgtgcatcatacatgaagaaaggcagcaaagtcatgcctaatattgaaaaactaaggtcttgtggcacacactctccctacatgaggccggtgtacccaactaaaacctttcctaacttatacactttggccactgggctatatccagaatcacatggaattgttggcaattcaatgtatgatcctgtatttgatgccacttttcatctgcgagggcgagagaaatttaatcatagatggtggggaggtcaaccgctatggattacagccaccaagcaaggggtgaaagctggaacattcttttggtctgttgtcatccctcacgagcggagaatattaaccatattgcagtggctcaccctgccagatcatgagaggccttcggtctatgccttctattctgagcaacctgatttctctggacacaaatatggccctttcggccctgaggagagtagttatggctcaccttttactccggctaagagacctaagaggaaagttgcccctaagaggagacaggaaagaccagttgctcctccaaagaaaagaagaagaaaaatacataggatggatcattatgctgcggaaactcgtcaggacaaaatgacaaatcctctgagggaaatcgacaaaattgtggggcaattaatggatggactgaaacaactaaaactgcatcggtgtgtcaacgtcatctttgtcggagaccatggaatggaagatgtcacatgtgatagaactgagttcttgagtaattacctaactaatgtggatgatattactttagtgcctggaactctaggaagaattcgatccaaatttagcaacaatgctaaatatgaccccaaagccattattgccaatctcacgtgtaaaaaaccagatcagcactttaagccttacttgaaacagcaccttcccaaacgtttgcactatgccaacaacagaagaattgaggatatccatttattggtggaacgcagatggcatgttgcaaggaaacctttggatgtttataagaaaccatcaggaaaatgctttttccagggagaccacggatttgataacaaggtcaacagcatgcagactgtttttgtaggttatggctcaacatttaagtacaagactaaagtgcctccatttgaaaacattgaactttacaatgttatgtgtgatctcctgggattgaagccagctcctaataatgggacccatggaagtttgaatcatctcctgcgcactaataccttcaggccaaccatgccagaggaagttaccagacccaattatccagggattatgtaccttcagtctgattttgacctgggctgcacttgtgatgataaggtagagccaaagaacaagttggatgaactcaacaaacggcttcatacaaaagggtctacagaagagagacacctcctctatgggcgacctgcagtgctttatcggactagatatgatatcttatatcacactgactttgaaagtggttatagtgaaatattcctaatgccactctggacatcatatactgtttccaaacaggctgaggtttccagcgttcctgaccatctgaccagttgcgtccggcctgatgtccgtgtttctccgagtttcagtcagaactgtttggcctacaaaaatgataagcagatgtcctacggattcctctttcctccttatctgagctcttcaccagaggctaaatatgatgcattccttgtaaccaatatggttccaatgtatcctgctttcaaacgggtctggaattatttccaaagggtattggtgaagaaatatgcttcggaaagaaatggagttaacgtgataagtggaccaatcttcgactatgactatgatggcttacatgacacagaagacaaaataaaacagtacgtggaaggcagttccattcctgttccaactcactactacagcatcatcaccagctgtctggatttcactcagcctgccgacaagtgtgacggccctctctctgtgtcctccttcatcctgcctcaccggcctgacaacgaggagagctgcaatagctcagaggacgaatcaaaatgggtagaagaactcatgaagatgcacacagctagggtgcgtgacattgaacatctcaccagcctggacttcttccgaaagaccagccgcagctacccagaaatcctgacactcaagacatacctgcatacatatgagagcgagatttaactttctgagcatctgcagtacagtcttatcaactggttgtatatttttatattgtttttgtatttattaatttgaaaccaggacattaaaaatgttagtattttaatcctgtaccaaatctgacatattatgcctgaatgactccactgtttttctctaatgcttgatttaggtagccttgtgttctgagtagagcttgtaataaatactgcagcttgagtttttagtggaagcttctaaatggtgctgcagatttgatatttgcattgaggaaatattaattttccaatgcacagttgccacatttagtcctgtactgtatggaaacactgattttgtaaagttgcctttatttgctgttaactgttaactatgacagatatatttaagccttataaaccaatcttaaacataataaatcacacattcagttttttctggttt

SEQ ID NO: 121 - DNA, 3172 bp, Homo sapiens
agtgctgggcggggcgctgactcacccgggcccgggctggccggttcttaagcggcagcgcgctgcgggcgccgagtgtcgggcgcggcaggaggacgaggcagggcgggcgggcgctctaagggttctgctctgactccaggttgggacagcgtcttcgctgctgctggatagtcgtgttttcggggatcgaggatactcaccagaaaccgaaaatgccgaaaccaatcaatgtccgagttaccaccatggatgcagagctggagtttgcaatccagccaaatacaactggaaaacagctttttgatcaggtggtaaagactatcggcctccgggaagtgtggtactttggcctccactatgtggataataaaggatttcctacctggctgaagctggataagaaggtgtctgcccaggaggtcaggaaggagaatcccctccagttcaagttccgggccaagttctaccctgaagatgtggctgaggagctcatccaggacatcacccagaaacttttcttcctccaagtgaaggaaggaatccttagcgatgagatctactgcccccctgagactgccgtgctcttggggtcctacgctgtgcaggccaagtttggggactacaacaaagaagtgcacaagtctgggtacctcagctctgagcggctgatccctcaaagagtgatggaccagcacaaacttaccagggaccagtgggaggaccggatccaggtgtggcatgcggaacaccgtgggatgctcaaagataatgctatgttggaatacctgaagattgctcaggacctggaaatgtatggaatcaactatttcgagataaaaaacaagaaaggaacagacctttggcttggagttgatgcccttggactgaatatttatgagaaagatgataagttaaccccaaagattggctttccttggagtgaaatcaggaacatctctttcaatgacaaaaagtttgtcattaaacccatcgacaagaaggcacctgactttgtgttttatgccccacgtctgagaatcaacaagcggatcctgcagctctgcatgggcaaccatgagttgtatatgcgccgcaggaagcctgacaccatcgaggtgcagcagatgaaggcccaggcccgggaggagaagcatcagaagcagctggagcggcaacagctggaaacagagaagaaaaggagagaaaccgtggagagagagaaagagcagatgatgcgcgagaaggaggagttgatgctgcggctgcaggactatgaggagaagacaaagaaggcagagagagagctctcggagcagattcagagggccctgcagctggaggaggagaggaagcgggcacaggaggaggccgagcgcctagaggctgaccgtatggctgcactgcgggctaaggaggagctggagagacaggcggtggatcagataaagagccaggagcagctggctgcggagcttgcagaatacactgccaagattgccctcctggaagaggcgcggaggcgcaaggaggatgaagttgaagagtggcagcacagggccaaagaagcccaggatgacctggtgaagaccaaggaggagctgcacctggtgatgacagcacccccgcccccaccaccccccgtgtacgagccggtgagctaccatgtccaggagagcttgcaggatgagggcgcagagcccacgggctacagcgcggagctgtctagtgagggcatccgggatgaccgcaatgaggagaagcgcatcactgaggcagagaagaacgagcgtgtgcagcggcagctgctgacgctgagcagcgagctgtcccaggcccgagatgagaataagaggacccacaatgacatcatccacaacgagaacatgaggcaaggccgggacaagtacaagacgctgcggcagatccggcagggcaacaccaagcagcgcatcgacgagttcgaggccctgtaacagccaggccaggaccaagggcagaggggtgctcatagcgggcgctgccagccccgccacgcttgtgtctttagtgctccaagtctaggaactccctcagatcccagttcctttagaaagcagttacccaacagaaacattctgggctgggaaccagggaggcgccctggtttgttttccccagttgtaatagtgccaagcaggcctgattctcgcgattattctcgaatcacctcctgtgttgtgctgggagcaggactgattgaattacggaaaatgcctgtaaagtctgagtaagaaacttcatgctggcctgtgtgatacaagagtcagcatcattaaaggaaacgtggcaggacttccatctgtgccatacttgttctgtattcgaaatgagctcaaattgattttttaatttctatgaaggatccatctttgtatatttacatgcttagaggggtgaaaattattttggaaattgagtctgaagcactctcgcacacacagtgattccctcctcccgtcactccacgcagctggcagagagcacagtgatcaccagcgtgagtggtggaggaggacacttggatttttttttttgttttttttttttttgcttaacagttttagaatacattgtacttatacaccttattaatgatcagctatatactatttatatacaagtgataatacagatttgtaacattagttttaaaaagggaaagttttgttctgtatattttgttaccttttacagaataaaagaattacatatgaaaaaccctctaaaccatggcacttgatgtgatgtggcaggagggcagtggtggagctggacctgcctgctgcagtcacgtgtaaacaggattattattagtgttttatgcatgtaatggactatgcacacttttaattttgtcagattcacacatgccactatgagctttcagactccagctgtgaagagactctgtttgcttgtgtttgtttgtttgcagtctctctctgccatggccttggcaggctgctggaaggcagcttgtggaggccgttggttccgcccactcattccttctcgtgcactgctttctccttcacagctaagatgccatgtgcaggtggattccatgccgcagacatgaaataaaagctttgcaaaggcacgaagcaaaaaaaaaaaaaaaaaaaaaaaa

SEQ ID NO: 122 - DNA, 1907 bp, Homo sapiens; identical to SEQ ID NO: 88

SEQ ID NO: 123 - DNA, 2084 bp, Homo sapiens
aagacacatgcttctgcaagcttccatgaaggttgtgcaaaaaagtttcaatccagagttgggttccagctttctgtagctgtaagcattggtggccacaccacctccttacaaagcaactagaacctgcggcatacattggagagatttttttaattttctggacatgaagtaaatttagagtgctttctaatttcaggtagaagacatgtccaccttctgattatttttggagaacattttgatttttttcatctctctctccccacccctaagattgtgcaaaaaaagcgtaccttgcctaattgaaataatttcattggattttgatcagaactgattatttggttttctgtgtgaagttttgaggtttcaaactttccttctggagaatgccttttgaaacaattttctctagctgcctgatgtcaactgcttagtaatcagtggatattgaaatattcaaaatgtacagagagtgggtagtggtgaatgttttcatgatgttgtacgtccagctggtgcagggctccagtaatgaacatggaccagtgaagcgatcatctcagtccacattggaacgatctgaacagcagatcagggctgcttctagtttggaggaactacttcgaattactcactctgaggactggaagctgtggagatgcaggctgaggctcaaaagttttaccagtatggactctcgctcagcatcccatcggtccactaggtttgcggcaactttctatgacattgaaacactaaaagttatagatgaagaatggcaaagaactcagtgcagccctagagaaacgtgcgtggaggtggccagtgagctggggaagagtaccaacacattcttcaagcccccttgtgtgaacgtgttccgatgtggtggctgttgcaatgaagagagccttatctgtatgaacaccagcacctcgtacatttccaaacagctctttgagatatcagtgcctttgacatcagtacctgaattagtgcctgttaaagttgccaatcatacaggttgtaagtgcttgccaacagccccccgccatccatactcaattatcagaagatccatccagatccctgaagaagatcgctgttcccattccaagaaactctgtcctattgacatgctatgggatagcaacaaatgtaaatgtgttttgcaggaggaaaatccacttgctggaacagaagaccactctcatctccaggaaccagctctctgtgggccacacatgatgtttgacgaagatcgttgcgagtgtgtctgtaaaacaccatgtcccaaagatctaatccagcaccccaaaaactgcagttgctttgagtgcaaagaaagtctggagacctgctgccagaagcacaagctatttcacccagacacctgcagctgtgaggacagatgcccctttcataccagaccatgtgcaagtggcaaaacagcatgtgcaaagcattgccgctttccaaaggagaaaagggctgcccaggggccccacagccgaaagaatccttgattcagcgttccaagttccccatccctgtcatttttaacagcatgctgctttgccaagttgctgtcactgtttttttcccaggtgttaaaaaaaaaatccattttacacagcaccacagtgaatccagaccaaccttccattcacaccagctaaggagtccctggttcattgatggatgtcttctagctgcagatgcctctgcgcaccaaggaatggagaggaggggacccatgtaatccttttgtttagttttgtttttgttttttggtgaatgagaaaggtgtgctggtcatggaatggcaggtgtcatatgactgattactcagagcagatgaggaaaactgtagtctctgagtcctttgctaatcgcaactcttgtgaattattctgattcttttttatgcagaatttgattcgtatgatcagtactgactttctgattactgtccagcttatagtcttccagtttaatgaactaccatctgatgtttcatatttaagtgtatttaaagaaaataaacaccattattcaagccatataaaaaaaaaaaa

SEQ ID NO: 124 - DNA, 1661 bp, Homo sapiens
attgcattcctgggcattgctaactagtgaagtataccagatggaaatgtcttcgaagctgtccctttaaaactcgagcaagctaccaggcaaactccgcctccagggaggttccttattaaataggagccaactggctgggtcggggctcaataccccaagcaatacctgcaactgaggattcttcccggggagaccgcagcccatcggcatggctcaagagtttgtgaactgcaaaatccagcctgggaaggtggttgtgttcatcaagcccacctgcccgtactgcaggagggcccaagagatcctcagtcaattgcccatcaaacaagggcttctggaatttgtcgatatcacagccaccaaccacactaacgagattcaagattatttgcaacagctcacgggagcaagaacggtgcctcgagtctttattggtaaagattgtataggcggatgcagtgatctagtctctttgcaacagagtggggaactgctgacgcggctaaagcagattggagctctgcagtaaccacagaacaggccccatgctgacgtccctcctcaagagctggatggcattgcaaatgatgacagcacttctggtggatgaatttgggggcacaaacagcttttttcctcttttggctcagtatttaaaagtggaccaacttgctcttaatcacagggccaagaaggttgacgggccatcttggttttcttctggatgtgctctttggttttcagaagactgtgacaagttctggcccaggattcgctcactgaccctcaattgtcctctttggcatgcgtttcttactgttctccatgtgtcggcatgtctctacctctaagccagtgtttttcaactatgtttatccagactccttctccacaatgatgaatccacagttggttatctgctactgcccattagctaaaatcattttgctgcttgactttatggagtttgtattatgaaatcagtgggtattttgaatgtgttctttctaactacatgcatctctccactcaactccaccccatcccatcccaccttgaaaatcactgctctgaaccagtgttctccaccttgtcctccacagatctcataggaaatgttcaacaattctgtgaaaggtcacaggacccaattggagaaatcatatgaaaagcatagttggtcttggtgtcatatggatcagaggcacaagtgcagaggctgtggtcatgcggaacactctgttatttaagatggctatccagataatcctgaacactgtgtatttattttatttagactaccagcaaagattaaagcatgaaatgtaaaacatctgataaaacttacagccccctacaccaagagtgtatctgtgaaagagctcctacactttgaaaacttaagaatcccttatcatgaagtttgcctgttctagaattgtaagattgttaatttccttcaatctctagtgacaacacttaatttcttttctaataaaaaaaacctatagatgattcagtgatttttgtccaattcatttgcatgttctcaagacattaaggaatgttatgcgaaatacactaacttaaaactgtgtttatatttggccctgccattataaataaagacacgtgctgctgtcaaaaaaaaaaaaaaa

SEQ ID NO: 125 - DNA, 822 bp, Homo sapiens; identical to SEQ ID NO: 95

SEQ ID NO: 126 - DNA, 2183 bp, Homo sapiens
tcagcactccaccaaagcctctgcctcagccttactgtgagtctggttgacagtagcttctaagatgtcccagcaacacacactgccagtgaccctctcccctgccctcagtcaggagctcctcaagactgttcctcctccagtcaatacccatcaggagcaaatgaaacagccaactccactgcctcccccatgccagaaggtgcctgtcgagctcccagtggaggtcccatcaaagcaagaggaaaagcacatgactgctgtaaagggactgcctgagcaagaatgtgagcaacagcagaaggagccacaggagcaggagctgcagcaacagcactgggaacagcatgaggaatatcagaaagcagaaaacccagagcagcagcttaagcaggagaaaacacaaagggatcagcagctaaacaaacagctggaagaagagaagaagctcttagaccagcaactggatcaagagctagtcaagagagatgagcaactgggaatgaagaaagagcaactgttggagctcccagagcagcaggaggggcacctgaagcacctagagcagcaggagggacagctgaagcacccggagcagcaggaggggcagctggagctcccagagcagcaggaggggcagctggagctcccagagcagcaggaggggcagctggagctcccagagcagcaggaggggcagctggagctcccagagcagcaggaggggcagctggagctcccagagcagcaggaggggcagctggagctcccacagcagcaggaggggcagctggagctctctgagcagcaggaggggcagctggagctctctgagcagcaggagggacagctgaagcacctggagcaccaggaggggcagctggaggtcccagaggagcagatggggcagctgaagtacctggaacagcaggaggggcagctgaagcacctggatcagcaggagaagcagccagagctcccagagcagcagatggggcagctgaagcacctggagcagcaggaggggcagcctaagcatctggagcagcaggaggggcaactggagcagctggaggagcaggaggggcagctgaagcacctggagcagcaggaggggcagctggagcacctggagcaccaggaagggcagctggggctcccagagcagcaggtgctgcagctgaagcagctagagaagcagcaggggcagccaaagcacctggaggaggaggaggggcagctgaagcacctggtgcagcaggaggggcagctgaagcatctggtgcagcaggaggggcagctggagcagcaggagaggcaggtggagcacctggagcagcaggtggggcagctgaagcacctagaggagcaggagggacaactgaagcatctggagcagcagcaggggcagttggaggtcccagagcagcaggtggggcagccaaagaacctggagcaggaggagaagcaactggagctcccagagcagcaagagggccaggtgaagcacctggagaagcaggaggcacagctggagctcccagagcagcaggtaggacagccaaagcacctggaacagcaggaaaagcacctagagcacccagagcagcaggacggacaactaaaacatctggagcagcaggaggggcagctgaaggacctggagcagcagaaggggcagctggagcagcctgtgtttgccccagctccaggccaggtccaagacattcaaccagccctgcccacaaagggagaagtattgcttcctgtagagcaccagcagcagaagcaggaggtgcagtggccacccaaacataaataaccacccgcagtgtccagaggccctcagatcgtctcatacaagggaagagagagccactggctccacttatttcgggtccgctaggtggcccgtctcatctgtgaacttgactctgtccctctacatgtctctttaatggggtgagggtgggggagagagggaattattgtccagtgccaaccccaatgaccccaatcccaacctcaggtgagcagagcctctacttgagggactattgttactataggaatccttacttccccagtattgaagctgaatcagtgagtgtgtacaatgatacataataaatcctggaagtcttgggatcctaaaaaaaaaaaaaaaaaaaaaaaaaaaaaaa

SEQ ID NO: 127 - DNA, 1229 bp, Homo sapiens
ctctcctcactcacccttcctggtgctttgggctctccttccttctcagacaagatgtcttatcagaaaaagcagcccacccctcagcccccagtggactgcgtgaagacctctggcggcggtggcggtggcggcggcagcggcggtggtggctgcggcttcttcggcggcggcggctcagggggcggtagcagcggttctggctgcggctactccggcggcggtggctactctggcggcggctgcggcgggggctcctccggcggcgggggcgggggcggcattggaggctgcggagggggctccggtgggagcgtcaagtactccggaggcggcggctcctccggcgggggctctggctgtttctccagcggtgggggcggctccggctgcttctcctccggtggcggcggctcctccgggggcggctccggctgcttctccagcggtgggggcggctcctccgggggcggctccggctgcttctcctccggcggcggcggcttctcgggccaggcggtccagtgccagagctacggaggcgtctctagcggcggctcctccgggggcggctccggctgcttctccagcggcgggggcggcggctctgtctgcggctactctggcggcggctctggctgcggcggaggctcctctggcggcagcggctccggctacgtctcctcgcagcaggtcactcagacctcgtgcgcgccccagccgagttacggaggggggtcgtccggcggcggcggcagcggcggaagcggctgcttctccagcggcgggggcggcgggagctccggctgcggcggcggctcctccgggattggcagcggctgcatcatcagtggcgggggctccgtctgcggaggtggttcctctggaggcggcggcggcggctcctccgtgggtggctccgggagtggcaagggcgtcccgatctgccaccagacccagcagaagcaggcgcctacctggccgtccaaatagatcccccagggtaccacggaggcgaaggagttggaggtgttttccaggggcaccgatgggcttagagctctcatgatgctacccgaggtttgcaaatccttcatgtcttaacctacctggaagaagccattgagctctccggctgcatctagttctgctgtttagcctctttggtttctgtacaactacctcccaaccccagtgcctcagtcaataaatttgcaaattcatgagaa

SEQ ID NO: 128 - DNA, 2081 bp, Homo sapiens
agcatgagtcagacagcctctggctttctggaagggcaaggactctatatatacagagggagcttcctagctgggatattggagcagcaagaggctgggaagccatcacttaccttgcactgagaaagaagacaaaggccagtatgcacagctttcctccactgctgctgctgctgttctggggtgtggtgtctcacagcttcccagcgactctagaaacacaagagcaagatgtggacttagtccagaaatacctggaaaaatactacaacctgaagaatgatgggaggcaagttgaaaagcggagaaatagtggcccagtggttgaaaaattgaagcaaatgcaggaattctttgggctgaaagtgactgggaaaccagatgctgaaaccctgaaggtgatgaagcagcccagatgtggagtgcctgatgtggctcagtttgtcctcactgaggggaaccctcgctgggagcaaacacatctgacctacaggattgaaaattacacgccagatttgccaagagcagatgtggaccatgccattgagaaagccttccaactctggagtaatgtcacacctctgacattcaccaaggtctctgagggtcaagcagacatcatgatatcttttgtcaggggagatcatcgggacaactctccttttgatggacctggaggaaatcttgctcatgcttttcaaccaggcccaggtattggaggggatgctcattttgatgaagatgaaaggtggaccaacaatttcagagagtacaacttacatcgtgttgcagctcatgaactcggccattctcttggactctcccattctactgatatcggggctttgatgtaccctagctacaccttcagtggtgatgttcagctagctcaggatgacattgatggcatccaagccatatatggacgttcccaaaatcctgtccagcccatcggcccacaaaccccaaaagcgtgtgacagtaagctaacctttgatgctataactacgattcggggagaagtgatgttctttaaagacagattctacatgcgcacaaatcccttctacccggaagttgagctcaatttcatttctgttttctggccacaactgccaaatgggcttgaagctgcttacgaatttgccgacagagatgaagtccggtttttcaaagggaataagtactgggctgttcagggacagaatgtgctacacggataccccaaggacatctacagctcctttggcttccctagaactgtgaagcatatcgatgctgctctttctgaggaaaacactggaaaaacctacttctttgttgctaacaaatactggaggtatgatgaatataaacgatctatggatccaggttatcccaaaatgatagcacatgactttcctggaattggccacaaagttgatgcagttttcatgaaagatggatttttctatttctttcatggaacaagacaatacaaatttgatcctaaaacgaagagaattttgactctccagaaagctaatagctggttcaactgcaggaaaaattgaacattactaatttgaatggaaaacacatggtgtgagtccaaagaaggtgttttcctgaagaactgtctattttctcagtcatttttaacctctagagtcactgatacacagaatataatcttatttatacctcagtttgcatatttttttactatttagaatgtagccctttttgtactgatataatttagttccacaaatggtgggtacaaaaagtcaagtttgtggcttatggattcatataggccagagttgcaaagatcttttccagagtatgcaactctgacgttgatcccagagagcagcttcagtgacaaacatatcctttcaagacagaaagagacaggagacatgagtctttgccggaggaaaagcagctcaagaacacatgtgcagtcactggtgtcaccctggataggcaagggataactcttctaacacaaaataagtgttttatgtttggaataaagtcaaccttgtttctactgttttatacactttcaaaaaaaaaaaaaaaaaaaaaaaaaa

SEQ ID NO: 129 - DNA, 1906 bp, Homo sapiens
aaagcaaggatgagtcaagctgcgggtgatccaaacaaacactgtcactctttaaaagctgcgctcccgaggttggacctacaaggaggcaggcaagacagcaaggcatagagacaacatagagctaagtaaagccagtggaaatgaagagtcttccaatcctactgttgctgtgcgtggcagtttgctcagcctatccattggatggagctgcaaggggtgaggacaccagcatgaaccttgttcagaaatatctagaaaactactacgacctcaaaaaagatgtgaaacagtttgttaggagaaaggacagtggtcctgttgttaaaaaaatccgagaaatgcagaagttccttggattggaggtgacggggaagctggactccgacactctggaggtgatgcgcaagcccaggtgtggagttcctgatgttggtcacttcagaacctttcctggcatcccgaagtggaggaaaacccaccttacatacaggattgtgaattatacaccagatttgccaaaagatgctgttgattctgctgttgagaaagctctgaaagtctgggaagaggtgactccactcacattctccaggctgtatgaaggagaggctgatataatgatctcttttgcagttagagaacatggagacttttacccttttgatggacctggaaatgttttggcccatgcctatgcccctgggccagggattaatggagatgcccactttgatgatgatgaacaatggacaaaggatacaacagggaccaatttatttctcgttgctgctcatgaaattggccactccctgggtctctttcactcagccaacactgaagctttgatgtacccactctatcactcactcacagacctgactcggttccgcctgtctcaagatgatataaatggcattcagtccctctatggacctccccctgactcccctgagacccccctggtacccacggaacctgtccctccagaacctgggacgccagccaactgtgatcctgctttgtcctttgatgctgtcagcactctgaggggagaaatcctgatctttaaagacaggcacttttggcgcaaatccctcaggaagcttgaacctgaattgcatttgatctcttcattttggccatctcttccttcaggcgtggatgccgcatatgaagttactagcaaggacctcgttttcatttttaaaggaaatcaattctgggctatcagaggaaatgaggtacgagctggatacccaagaggcatccacaccctaggtttccctccaaccgtgaggaaaatcgatgcagccatttctgataaggaaaagaacaaaacatatttctttgtagaggacaaatactggagatttgatgagaagagaaattccatggagccaggctttcccaagcaaatagctgaagactttccagggattgactcaaagattgatgctgtttttgaagaatttgggttcttttatttctttactggatcttcacagttggagtttgacccaaatgcaaagaaagtgacacacactttgaagagtaacagctggcttaattgttgaaagagatatgtagaaggcacaatatgggcactttaaatgaagctaataattcttcacctaagtctctgtgaattgaaatgttcgttttctcctgcctgtgctgtgactcgagtcacactcaagggaacttgagcgtgaatctgtatcttgccggtcatttttatgttattacagggcattcaaatgggctgctgcttagcttgcaccttgtcacatagagtgatctttcccaagagaaggggaagcactcgtgtgcaacagacaagtgactgtatctgtgtagactatttgcttatttaataaagacgatttgtcagttattttatctt

SEQ ID NO: 130 - DNA, 2387 bp, Homo sapiens; identical to SEQ ID NO: 42

SEQ ID NO: 131 - DNA, 3207 bp, Homo sapiens; identical to SEQ ID NO: 53

SEQ ID NO: 132 - DNA, 2398 bp, Homo sapiens
ctgatatagagcaggcgccgcgggtcgcagcacagtgcggagaccgcagccccggagcccgggccagggtccacctgtccccgcagcgccggctcgcgccctcctgccgcagccaccgagccgccgtctagcgccccgacctcgccaccatgagagccctgctggcgcgcctgcttctctgcgtcctggtcgtgagcgactccaaaggcagcaatgaacttcatcaagttccatcgaactgtgactgtctaaatggaggaacatgtgtgtccaacaagtacttctccaacattcactggtgcaactgcccaaagaaattcggagggcagcactgtgaaatagataagtcaaaaacctgctatgaggggaatggtcacttttaccgaggaaaggccagcactgacaccatgggccggccctgcctgccctggaactctgccactgtccttcagcaaacgtaccatgcccacagatctgatgctcttcagctgggcctggggaaacataattactgcaggaacccagacaaccggaggcgaccctggtgctatgtgcaggtgggcctaaagccgcttgtccaagagtgcatggtgcatgactgcgcagatggaaaaaagccctcctctcctccagaagaattaaaatttcagtgtggccaaaagactctgaggccccgctttaagattattgggggagaattcaccaccatcgagaaccagccctggtttgcggccatctacaggaggcaccgggggggctctgtcacctacgtgtgtggaggcagcctcatcagcccttgctgggtgatcagcgccacacactgcttcattgattacccaaagaaggaggactacatcgtctacctgggtcgctcaaggcttaactccaacacgcaaggggagatgaagtttgaggtggaaaacctcatcctacacaaggactacagcgctgacacgcttgctcaccacaacgacattgccttgctgaagatccgttccaaggagggcaggtgtgcgcagccatcccggactatacagaccatctgcctgccctcgatgtataacgatccccagtttggcacaagctgtgagatcactggctttggaaaagagaattctaccgactatctctatccggagcagctgaaaatgactgttgtgaagctgatttcccaccgggagtgtcagcagccccactactacggctctgaagtcaccaccaaaatgctgtgtgctgctgacccacagtggaaaacagattcctgccagggagactcagggggacccctcgtctgttccctccaaggccgcatgactttgactggaattgtgagctggggccgtggatgtgccctgaaggacaagccaggcgtctacacgagagtctcacacttcttaccctggatccgcagtcacaccaaggaagagaatggcctggccctctgagggtccccagggaggaaacgggcaccacccgctttcttgctggttgtcatttttgcagtagagtcatctccatcagctgtaagaagagactgggaagataggctctgcacagatggatttgcctgtgccacccaccagggcgaacgacaatagctttaccctcaggcataggcctgggtgctggctgcccagacccctctggccaggatggaggggtggtcctgactcaacatgttactgaccagcaacttgtctttttctggactgaagcctgcaggagttaaaaagggcagggcatctcctgtgcatgggtgaagggagagccagctcccccgacggtgggcatttgtgaggcccatggttgagaaatgaataatttcccaattaggaagtgtaacagctgaggtctcttgagggagcttagccaatgtgggagcagcggtttggggagcagagacactaacgacttcagggcagggctctgatattccatgaatgtatcaggaaatatatatgtgtgtgtatgtttgcacacttgtgtgtgggctgtgagtgtaagtgtgagtaagagctggtgtctgattgttaagtctaaatatttccttaaactgtgtggactgtgatgccacacagagtggtctttctggagaggttataggtcactcctggggcctcttgggtcccccacgtgacagtgcctgggaatgtattattctgcagcatgacctgtgaccagcactgtctcagtttcactttcacatagatgtccctttcttggccagttatcccttccttttagcctagttcatccaatcctcactgggtggggtgaggaccactcctgtacactgaatatttatatttcactatttttatttatatttttgtaattttaaataaaagtgatcaataaaatgtgatttttctgatgacaaaaaaaaaaaaaaaaaaaa

SEQ ID NO: 133 - DNA, 1570 bp, Homo sapiens
gccgagccagccccttcaccaccagccggccgcgccccgggaagggaagtttgtggcggaggaggttcgtacgggaggagggggaggcgcccacgcatctggggctgactcgctctttcgcaaaacgtctgggaggagtccctggggccacaaaactgcctccttcctgaggccagaaggagagaagacgtgcagggaccccgcgcacaggagctgccctcgcgacatgggtcacccgccgctgctgccgctgctgctgctgctccacacctgcgtcccagcctcttggggcctgcggtgcatgcagtgtaagaccaacggggattgccgtgtggaagagtgcgccctgggacaggacctctgcaggaccacgatcgtgcgcttgtgggaagaaggagaagagctggagctggtggagaaaagctgtacccactcagagaagaccaacaggaccctgagctatcggactggcttgaagatcaccagccttaccgaggttgtgtgtgggttagacttgtgcaaccagggcaactctggccgggctgtcacctattcccgaagccgttacctcgaatgcatttcctgtggctcatcagacatgagctgtgagaggggccggcaccagagcctgcagtgccgcagccctgaagaacagtgcctggatgtggtgacccactggatccaggaaggtgaagaagggcgtccaaaggatgaccgccacctccgtggctgtggctaccttcccggctgcccgggctccaatggtttccacaacaacgacaccttccacttcctgaaatgctgcaacaccaccaaatgcaacgagggcccaatcctggagcttgaaaatctgccgcagaatggccgccagtgttacagctgcaaggggaacagcacccatggatgctcctctgaagagactttcctcattgactgccgaggccccatgaatcaatgtctggtagccaccggcactcacgaaccgaaaaaccaaagctatatggtaagaggctgtgcaaccgcctcaatgtgccaacatgcccacctgggtgacgccttcagcatgaaccacattgatgtctcctgctgtactaaaagtggctgtaaccacccagacctggatgtccagtaccgcagtggggctgctcctcagcctggccctgcccatctcagcctcaccatcaccctgctaatgactgccagactgtggggaggcactctcctctggacctaaacctgaaatccccctctctgccctggctggatccgggggacccctttgcccttccctcggctcccagccctacagacttgctgtgtgacctcaggccagtgtgccgacctctctgggcctcagttttcccagctatgaaaacagctatctcacaaagttgtgtgaagcagaagagaaaagctggaggaaggccgtgggccaatgggagagctcttgttattattaatattgttgccgctgttgtgttgttgttattaattaatattcatattatttattttatacttacataaagattttgtaccagtggacaaggccaaaaaaaaaaaaaaaaaa

SEQ ID NO: 134 - DNA, 4507 bp, Homo sapiens; identical to SEQ ID NO: 51

SEQ ID NO: 135 - DNA, 1002 bp, Homo sapiens
gagccctgcaggcagggggcttccaggcttgggacacctgggcattcctgggccaggaaagcacccaacaaacctgcaactcagaagccaaatgagacctatcccaggcaggtccgctctgcgatggtggctctcatacaccgcacagaagtgaggcatcggggacagccgctgcggcagcactcgagccagctcaagcccgcagctcgcagggagatccagctccgtcctgcctgcagcagcacaaccctgcacacccaccatggatgtcttcaagaagggcttctccatcgccaaggagggcgtggtgggtgcggtggaaaagaccaagcagggggtgacggaagcagctgagaagaccaaggagggggtcatgtatgtgggagccaagaccaaggagaatgttgtacagagcgtgacctcaggcctgccttggggctggggctggggtggaggccagccagtgtcctcccatagtggccgagaagaccaaggagcaggccaacgccgtgagcgaggctgtggtgagcagcgtcaacactgtggccaccaagaccgtggaggaggcggagaacatcgcggtcacctccggggtggtgcgcaaggaggacttgaggccatctgccccccaacaggagggtgaggcatccaaagagaaagaggaagtggcagaggaggcccagagtgggggagactagagggctacaggccagcgtggatgacctgaagagcgctcctctgccttggacaccatcccctcctagcacaaggagtgcccgccttgagtgacatgcggctgcccacgctcctgccctcgtctccctggccacccttggcctgtccacctgtgctgctgcaccaacctcactgccctccctcggccccacccaccctctggtccttctgaccccacttatgctgctgtgaattttttttttaaatgattccaaataaaacttgagcccactcctgcaaaaaaaaaaaaaaaaaaaaaaaaaaaaa

SEQ ID NO: 136 - DNA, 931 bp, Homo sapiens; identical to SEQ ID NO: 68

SEQ ID NO: 137 - DNA, 2591 bp, Homo sapiens
gatgggattggggttttcccctcccatgtgctcaagactggcgctaaaagttttgagcttctcaaaagtctagagccaccgtccagggagcaggtagctgctgggctccggggacactttgcgttcgggctgggagcgtgctttccacgacggtgacacgcttccctggattggcagccagactgccttccgggtcactgccatggaggagccgcagtcagatcctagcgtcgagccccctctgagtcaggaaacattttcagacctatggaaactacttcctgaaaacaacgttctgtcccccttgccgtcccaagcaatggatgatttgatgctgtccccggacgatattgaacaatggttcactgaagacccaggtccagatgaagctcccagaatgccagaggctgctccccccgtggcccctgcaccagcagctcctacaccggcggcccctgcaccagccccctcctggcccctgtcatcttctgtcccttcccagaaaacctaccagggcagctacggtttccgtctgggcttcttgcattctgggacagccaagtctgtgacttgcacgtactcccctgccctcaacaagatgttttgccaactggccaagacctgccctgtgcagctgtgggttgattccacacccccgcccggcacccgcgtccgcgccatggccatctacaagcagtcacagcacatgacggaggttgtgaggcgctgcccccaccatgagcgctgctcagatagcgatggtctggcccctcctcagcatcttatccgagtggaaggaaatttgcgtgtggagtatttggatgacagaaacacttttcgacatagtgtggtggtgccctatgagccgcctgaggttggctctgactgtaccaccatccactacaactacatgtgtaacagttcctgcatgggcggcatgaaccggaggcccatcctcaccatcatcacactggaagactccagtggtaatctactgggacggaacagctttgaggtgcgtgtttgtgcctgtcctgggagagaccggcgcacagaggaagagaatctccgcaagaaaggggagcctcaccacgagctgcccccagggagcactaagcgagcactgcccaacaacaccagctcctctccccagccaaagaagaaaccactggatggagaatatttcacccttcagatccgtgggcgtgagcgcttcgagatgttccgagagctgaatgaggccttggaactcaaggatgcccaggctgggaaggagccaggggggagcagggctcactccagccacctgaagtccaaaaagggtcagtctacctcccgccataaaaaactcatgttcaagacagaagggcctgactcagactgacattctccacttcttgttccccactgacagcctcccacccccatctctccctcccctgccattttgggttttgggtctttgaacccttgcttgcaataggtgtgcgtcagaagcacccaggacttccatttgctttgtcccggggctccactgaacaagttggcctgcactggtgttttgttgtggggaggaggatggggagtaggacataccagcttagattttaaggtttttactgtgagggatgtttgggagatgtaagaaatgttcttgcagttaagggttagtttacaatcagccacattctaggtaggggcccacttcaccgtactaaccagggaagctgtccctcactgttgaattttctctaacttcaaggcccatatctgtgaaatgctggcatttgcacctacctcacagagtgcattgtgagggttaatgaaataatgtacatctggccttgaaaccaccttttattacatggggtctagaacttgacccccttgagggtgcttgttccctctccctgttggtcggtgggttggtagtttctacagttgggcagctggttaggtagagggagttgtcaagtctctgctggcccagccaaaccctgtctgacaacctcttggtgaaccttagtacctaaaaggaaatctcaccccatcccacaccctggaggatttcatctcttgtatatgatgatctggatccaccaagacttgttttatgctcagggtcaatttcttttttcttttttttttttttttttctttttctttgagactgggtctcgctttgttgcccaggctggagtggagtggcgtgatcttggcttactgcagcctttgcctccccggctcgagcagtcctgcctcagcctccggagtagctgggaccacaggttcatgccaccatggccagccaacttttgcatgttttgtagagatggggtctcacagtgttgcccaggctggtctcaaactcctgggctcaggcgatccacctgtctcagcctcccagagtgctgggattacaattgtgagccaccacgtccagctggaagggtcaacatcttttacattctgcaagcacatctgcattttcaccccacccttcccctccttctccctttttatatcccatttttatatcgatctcttattttacaataaaactttgctgccacctgtgtgtctgaggggtg

SEQ ID NO: 138 - DNA, 2195 bp, Homo sapiens
aagaaaaaccttcccggtgcaatcgtgatctgggaggcccacgtatggcgcctctccaaaggctgcagaagtttcttgctaacaaaaagtccgcacattcgagcaaagacaggctttagcgagttattaaaaacttaggggcgctcttgtcccccacagggcccgaccgcacacagcaaggcgatggcccagctgtaagttggtagcactgagaactagcagcgcgcgcggagcccgctgagacttgaatcaatctggtctaacggtttcccctaaaccgctaggagccctcaatcggcgggacagcagggcgcgtcctctgccactctcgctccgaggtccccgcgccagagacgcagccgcgctcccaccacccacacccaccgcgccctcgttcgcctcttctccgggagccagtccgcgccaccgccgccgcccaggccatcgccaccctccgcagccatgtccaccaggtccgtgtcctcgtcctcctaccgcaggatgttcggcggcccgggcaccgcgagccggccgagctccagccggagctacgtgactacgtccacccgcacctacagcctgggcagcgcgctgcgccccagcaccagccgcagcctctacgcctcgtccccgggcggcgtgtatgccacgcgctcctctgccgtgcgcctgcggagcagcgtgcccggggtgcggctcctgcaggactcggtggacttctcgctggccgacgccatcaacaccgagttcaagaacacccgcaccaacgagaaggtggagctgcaggagctgaatgaccgcttcgccaactacatcgacaaggtgcgcttcctggagcagcagaataagatcctgctggccgagctcgagcagctcaagggccaaggcaagtcgcgcctgggggacctctacgaggaggagatgcgggagctgcgccggcaggtggaccagctaaccaacgacaaagcccgcgtcgaggtggagcgcgacaacctggccgaggacatcatgcgcctccgggagaaattgcaggaggagatgcttcagagagaggaagccgaaaacaccctgcaatctttcagacaggatgttgacaatgcgtctctggcacgtcttgaccttgaacgcaaagtggaatctttgcaagaagagattgcctttttgaagaaactccacgaagaggaaatccaggagctgcaggctcagattcaggaacagcatgtccaaatcgatgtggatgtttccaagcctgacctcacggctgccctgcgtgacgtacgtcagcaatatgaaagtgtggctgccaagaacctgcaggaggcagaagaatggtacaaatccaagtttgctgacctctctgaggctgccaaccggaacaatgacgccctgcgccaggcaaagcaggagtccactgagtaccggagacaggtgcagtccctcacctgtgaagtggatgcccttaaaggaaccaatgagtccctggaacgccagatgcgtgaaatggaagagaactttgccgttgaagctgctaactaccaagacactattggccgcctgcaggatgagattcagaatatgaaggaggaaatggctcgtcaccttcgtgaataccaagacctgctcaatgttaagatggcccttgacattgagattgccacctacaggaagctgctggaaggcgaggagagcaggatttctctgcctcttccaaacttttcctccctgaacctgagggaaactaatctggattcactccctctggttgatacccactcaaaaaggacacttctgattaagacggttgaaactagagatggacaggttatcaacgaaacttctcagcatcacgatgaccttgaataaaaattgcacacactcagtgcagcaatatattaccagcaagaataaaaaagaaatccatatcttaaagaaacagctttcaagtgcctttctgcagtttttcaggagcgcaagatagatttggaataggaataagctctagttcttaacaaccgacactcctacaagatttagaaaaaagtttacaacataatctagtttacagaaaaatcttgtgctagaatactttttaaaaggtattttgaataccattaaaactgcttttttttttccagcaagtatccaaccaacttggttctgcttcaataaatctttggaaaaactcttttaaaaaa

SEQ ID NO: 139 - DNA, 3008 bp, Homo sapiens
taattatgggtctgtaaccaccctggactgggtgctcctcactgacggacttgtctgaacctctctttgtctccagcgcccagcactgggcctggcaaaacctgagacgcccggtacatgttggccaaatgaatgaaccagattcagaccggcaggggcgctgtggtttaggaggggcctggggtttctcccaggaggtttttgggcttgcgctggagggctctggactcccgtttgcgccagtggcctgcatcctggtcctgtcttcctcatgtttgaatttctttgctttcctagtctggggagcagggaggagccctgtgccctgtcccaggatccatgggtaggaacaccatggacagggagagcaaacggggccatctgtcaccaggggcttagggaaggccgagccagcctgggtcaaagaagtcaaaggggctgcctggaggaggcagcctgtcagctggtgcatcagaggctgtggccaggccagctgggctcggggagcgccagcctgagaggagcgcgtgagcgtcgcgggagcctcgggcaccatgagcgacgtggctattgtgaaggagggttggctgcacaaacgaggggagtacatcaagacctggcggccacgctacttcctcctcaagaatgatggcaccttcattggctacaaggagcggccgcaggatgtggaccaacgtgaggctcccctcaacaacttctctgtggcgcagtgccagctgatgaagacggagcggccccggcccaacaccttcatcatccgctgcctgcagtggaccactgtcatcgaacgcaccttccatgtggagactcctgaggagcgggaggagtggacaaccgccatccagactgtggctgacggcctcaagaagcaggaggaggaggagatggacttccggtcgggctcacccagtgacaactcaggggctgaagagatggaggtgtccctggccaagcccaagcaccgcgtgaccatgaacgagtttgagtacctgaagctgctgggcaagggcactttcggcaaggtgatcctggtgaaggagaaggccacaggccgctactacgccatgaagatcctcaagaaggaagtcatcgtggccaaggacgaggtggcccacacactcaccgagaaccgcgtcctgcagaactccaggcaccccttcctcacagccctgaagtactctttccagacccacgaccgcctctgctttgtcatggagtacgccaacgggggcgagctgttcttccacctgtcccgggagcgtgtgttctccgaggaccgggcccgcttctatggcgctgagattgtgtcagccctggactacctgcactcggagaagaacgtggtgtaccgggacctcaagctggagaacctcatgctggacaaggacgggcacattaagatcacagacttcgggctgtgcaaggaggggatcaaggacggtgccaccatgaagaccttttgcggcacacctgagtacctggcccccgaggtgctggaggacaatgactacggccgtgcagtggactggtgggggctgggcgtggtcatgtacgagatgatgtgcggtcgcctgcccttctacaaccaggaccatgagaagctttttgagctcatcctcatggaggagatccgcttcccgcgcacgcttggtcccgaggccaagtccttgctttcagggctgctcaagaaggaccccaagcagaggcttggcgggggctccgaggacgccaaggagatcatgcagcatcgcttctttgccggtatcgtgtggcagcacgtgtacgagaagaagctcagcccacccttcaagccccaggtcacgtcggagactgacaccaggtattttgatgaggagttcacggcccagatgatcaccatcacaccacctgaccaagatgacagcatggagtgtgtggacagcgagcgcaggccccacttcccccagttctcctactcggccagcggcacggcctgaggcggcggtggactgcgctggacgatagcttggagggatggagaggcggcctcgtgccatgatctgtatttaatggtttttatttctcgggtgcatttgagagaagccacgctgtcctctcgagcccagatggaaagacgtttttgtgctgtgggcagcaccctcccccgcagcggggtagggaagaaaactatcctgcgggttttaatttatttcatccagtttgttctccgggtgtggcctcagccctcagaacaatccgattcacgtagggaaatgttaaggacttctgcagctatgcgcaatgtggcattggggggccgggcaggtcctgcccatgtgtcccctcactctgtcagccagccgccctgggctgtctgtcaccagctatctgtcatctctctggggccctgggcctcagttcaacctggtggcaccagatgcaacctcactatggtatgctggccagcaccctctcctgggggtggcaggcacacagcagccccccagcactaaggccgtgtctctgaggacgtcatcggaggctgggcccctgggatgggaccagggatgggggatgggccagggtttacccagtgggacagaggagcaaggtttaaatttgttattgtgtattatgttgttcaaatgcattttgggggtttttaatctttgtgacaggaaagccctcccccttccccttctgtgtcacagttcttggtgactgtcccaccgggagcctccccctcagatgatctctccacggtagcacttgaccttttcgacgcttaacctttccgctgtcgccccaggccctccctgactccctgtgggggtggccatccctgggcccctccacgcctcctggccagacgctgccgctgccgctgcaccacggcgtttttttacaacattcaactttagtatttttactattataatataatatggaaccttccctccaaattcttcaataaaagttgcttttcaaaaaaaaaaaaaaaaaaaaaa

SEQ ID NO: 140 - DNA, 6492 bp, Homo sapiens; identical to SEQ ID NO: 72

SEQ ID NO: 141 - DNA, 2820 bp, Homo sapiens
gaaaccttgaaccccattgagaagtccctttagggtttcggacgcctccacctcaccctgggctggtgcttaaatagaaaaaagaaaaacaaaaaccaactaaatccataccagccacctccgggagagtactcctggctcccagtaggaggcggagagccaaggggcgtgcaagagagagggggctgggctcccgggtggcaggaggccgcggctgcggagcggccgccctcgatccgggcgatggaggaggaagcaagcgagggggctggttcctgagcttcgcaattcctgtgtcgccttctgggctcccagcctgccgggtcgcatgatccctccggccggagctggtttttttgccagccaccgcgaggccggctgagttaccggcatccccgcagccacctcctctcccgacctgtgatacaaaagatcttccgggggctgcacctgcctgcctttgcctaaggcggatttgaatctctttctctcccttcagaatcttatcttggctttggatcttagaagagaatcactaaccagagacgagactcagtgagtgagcaggtgttttggacaatggactggttgagcccatccctattataaaaatgtctcagagcaaccgggagctggtggttgactttctctcctacaagctttcccagaaaggatacagctggagtcagtttagtgatgtggaagagaacaggactgaggccccagaagggactgaatcggagatggagacccccagtgccatcaatggcaacccatcctggcacctggcagacagccccgcggtgaatggagccactggccacagcagcagtttggatgcccgggaggtgatccccatggcagcagtaaagcaagcgctgagggaggcaggcgacgagtttgaactgcggtaccggcgggcattcagtgacctgacatcccagctccacatcaccccagggacagcatatcagagctttgaacaggtagtgaatgaactcttccgggatggggtaaactggggtcgcattgtggcctttttctccttcggcggggcactgtgcgtggaaagcgtagacaaggagatgcaggtattggtgagtcggatcgcagcttggatggccacttacctgaatgaccacctagagccttggatccaggagaacggcggctgggatacttttgtggaactctatgggaacaatgcagcagccgagagccgaaagggccaggaacgcttcaaccgctggttcctgacgggcatgactgtggccggcgtggttctgctgggctcactcttcagtcggaaatgaccagacactgaccatccactctaccctcccacccccttctctgctccaccacatcctccgtccagccgccattgccaccaggagaaccactacatgcagcccatgcccacctgcccatcacagggttgggcccagatctggtcccttgcagctagttttctagaatttatcacacttctgtgagacccccacacctcagttcccttggcctcagaattcacaaaatttccacaaaatctgtccaaaggaggctggcaggtatggaagggtttgtggctgggggcaggagggccctacctgattggtgcaacccttaccccttagcctccctgaaaatgtttttctgccagggagcttgaaagttttcagaacctcttccccagaaaggagactagattgcctttgttttgatgtttgtggcctcagaattgatcattttccccccactctccccacactaacctgggttccctttccttccatccctaccccctaagagccatttaggggccacttttgactagggattcaggctgcttgggataaagatgcaaggaccaggactccctcctcacctctggactggctagagtcctcactcccagtccaaatgtcctccagaagcctctggctagaggccagccccacccaggagggagggggctatagctacaggaagcaccccatgccaaagctagggtggcccttgcagttcagcaccaccctagtcccttcccctccctggctcccatgaccatactgagggaccaactgggcccaagacagatgccccagagctgtttatggcctcagctgcctcacttcctacaagagcagcctgtggcatctttgccttgggctgctcctcatggtgggttcaggggactcagccctgaggtgaaagggagctatcaggaacagctatgggagccccagggtcttccctacctcaggcaggaagggcaggaaggagagcctgctgcatggggtggggtagggctgactagaagggccagtcctgcctggccaggcagatctgtgccccatgcctgtccagcctgggcagccaggctgccaaggccagagtggcctggccaggagctcttcaggcctccctctctcttctgctccacccttggcctgtctcatccccaggggtcccagccaccccgggctctctgctgtacatatttgagactagtttttattccttgtgaagatgatatactatttttgttaagcgtgtctgtatttatgtgtgaggagctgctggcttgcagtgcgcgtgcacgtggagagctggtgcccggagattggacggcctgatgctccctcccctgccctggtccagggaagctggccgagggtcctggctcctgaggggcatctgcccctcccccaacccccaccccacacttgttccagctctttgaaatagtctgtgtgaaggtgaaagtgcagttcagtaataaactgtgtttactcagtgaaaaaaaaaaaaaaaaaa

SEQ ID NO: 142 - DNA, 2655 bp, Homo sapiens
cccagaaggccgcggggggtggaccgcctaagagggcgtgcgctcccgacatgccccgcggcgcgccattaaccgccagatttgaatcgcgggacccgttggcagaggtggcggcggcggcatgggtgccccgacgttgccccctgcctggcagccctttctcaaggaccaccgcatctctacattcaagaactggcccttcttggagggctgcgcctgcaccccggagcggatggccgaggctggcttcatccactgccccactgagaacgagccagacttggcccagtgtttcttctgcttcaaggagctggaaggctgggagccagatgacgaccccatagaggaacataaaaagcattcgtccggttgcgctttcctttctgtcaagaagcagtttgaagaattaacccttggtgaatttttgaaactggacagagaaagagccaagaacaaaattgcaaaggaaaccaacaataagaagaaagaatttgaggaaactgcggagaaagtgcgccgtgccatcgagcagctggctgccatggattgaggcctctggccggagctgcctggtcccagagtggctgcaccacttccagggtttattccctggtgccaccagccttcctgtgggccccttagcaatgtcttaggaaaggagatcaacattttcaaattagatgtttcaactgtgctcttgttttgtcttgaaagtggcaccagaggtgcttctgcctgtgcagcgggtgctgctggtaacagtggctgcttctctctctctctctcttttttgggggctcatttttgctgttttgattcccgggcttaccaggtgagaagtgagggaggaagaaggcagtgtcccttttgctagagctgacagctttgttcgcgtgggcagagccttccacagtgaatgtgtctggacctcatgttgttgaggctgtcacagtcctgagtgtggacttggcaggtgcctgttgaatctgagctgcaggttccttatctgtcacacctgtgcctcctcagaggacagtttttttgttgttgtgtttttttgtttttttttttttggtagatgcatgacttgtgtgtgatgagagaatggagacagagtccctggctcctctactgtttaacaacatggctttcttattttgtttgaattgttaattcacagaatagcacaaactacaattaaaactaagcacaaagccattctaagtcattggggaaacggggtgaacttcaggtggatgaggagacagaatagagtgataggaagcgtctggcagatactccttttgccactgctgtgtgattagacaggcccagtgagccgcggggcacatgctggccgctcctccctcagaaaaaggcagtggcctaaatcctttttaaatgacttggctcgatgctgtgggggactggctgggctgctgcaggccgtgtgtctgtcagcccaaccttcacatctgtcacgttctccacacgggggagagacgcagtccgcccaggtccccgctttctttggaggcagcagctcccgcagggctgaagtctggcgtaagatgatggatttgattcgccctcctccctgtcatagagctgcagggtggattgttacagcttcgctggaaacctctggaggtcatctcggctgttcctgagaaataaaaagcctgtcatttcaaacactgctgtggaccctactgggtttttaaaatattgtcagtttttcatcgtcgtccctagcctgccaacagccatctgcccagacagccgcagtgaggatgagcgtcctggcagagacgcagttgtctctgggcgcttgccagagccacgaaccccagacctgtttgtatcatccgggctccttccgggcagaaacaactgaaaatgcacttcagacccacttatttctgccacatctgagtcggcctgagatagacttttccctctaaactgggagaatatcacagtggtttttgttagcagaaaatgcactccagcctctgtactcatctaagctgcttatttttgatatttgtgtcagtctgtaaatggatacttcactttaataactgttgcttagtaattggctttgtagagaagctggaaaaaaatggttttgtcttcaactcctttgcatgccaggcggtgatgtggatctcggcttctgtgagcctgtgctgtgggcagggctgagctggagccgcccctctcagcccgcctgccacggcctttccttaaaggccatccttaaaaccagaccctcatggctaccagcacctgaaagcttcctcgacatctgttaataaagccgtaggcccttgtctaagtgcaaccgcctagactttctttcagatacatgtccacatgtccatttttcaggttctctaagttggagtggagtctgggaagggttgtgaatgaggcttctgggctatgggtgaggttccaatggcaggttagagcccctcgggccaactgccatcctggaaagtagagacagcagtgcccgctgcccagaagagaccagcaagccaaactggagcccccattgcaggctgtcgccatgtggaaagagtaactcacaattgccaataaagtctcatgtggttttatctaaaaaaaaaaaaaaaaaaaaaaaaa

SEQ ID NO: 143 - DNA, 4304 bp, Homo sapiens; identical to SEQ ID NO: 116

SEQ ID NO: 144 - DNA, 3691 bp, Homo sapiens
ggcgcaacgctgagcagctggcgcgtcccgcgcggccccagttctgcgcagcttcccgaggctccgcaccagccgcgcttctgtccgcctgcagggcattccagaaagatgaggatatttgctgtctttatattcatgacctactggcatttgctgaacgcatttactgtcacggttcccaaggacctatatgtggtagagtatggtagcaatatgacaattgaatgcaaattcccagtagaaaaacaattagacctggctgcactaattgtctattgggaaatggaggataagaacattattcaatttgtgcatggagaggaagacctgaaggttcagcatagtagctacagacagagggcccggctgttgaaggaccagctctccctgggaaatgctgcacttcagatcacagatgtgaaattgcaggatgcaggggtgtaccgctgcatgatcagctatggtggtgccgactacaagcgaattactgtgaaagtcaatgccccatacaacaaaatcaaccaaagaattttggttgtggatccagtcacctctgaacatgaactgacatgtcaggctgagggctaccccaaggccgaagtcatctggacaagcagtgaccatcaagtcctgagtggtaagaccaccaccaccaattccaagagagaggagaagcttttcaatgtgaccagcacactgagaatcaacacaacaactaatgagattttctactgcacttttaggagattagatcctgaggaaaaccatacagctgaattggtcatcccagaactacctctggcacatcctccaaatgaaaggactcacttggtaattctgggagccatcttattatgccttggtgtagcactgacattcatcttccgtttaagaaaagggagaatgatggatgtgaaaaaatgtggcatccaagatacaaactcaaagaagcaaagtgatacacatttggaggagacgtaatccagcattggaacttctgatcttcaagcagggattctcaacctgtggtttaggggttcatcggggctgagcgtgacaagaggaaggaatgggcccgtgggatgcaggcaatgtgggacttaaaaggcccaagcactgaaaatggaacctggcgaaagcagaggaggagaatgaagaaagatggagtcaaacagggagcctggagggagaccttgatactttcaaatgcctgaggggctcatcgacgcctgtgacagggagaaaggatacttctgaacaaggagcctccaagcaaatcatccattgctcatcctaggaagacgggttgagaatccctaatttgagggtcagttcctgcagaagtgccctttgcctccactcaatgcctcaatttgttttctgcatgactgagagtctcagtgttggaacgggacagtatttatgtatgagtttttcctatttattttgagtctgtgaggtcttcttgtcatgtgagtgtggttgtgaatgatttcttttgaagatatattgtagtagatgttacaattttgtcgccaaactaaacttgctgcttaatgatttgctcacatctagtaaaacatggagtatttgtaaggtgcttggtctcctctataactacaagtatacattggaagcataaagatcaaaccgttggttgcataggatgtcacctttatttaacccattaatactctggttgacctaatcttattctcagacctcaagtgtctgtgcagtatctgttccatttaaatatcagctttacaattatgtggtagcctacacacataatctcatttcatcgctgtaaccaccctgttgtgataaccactattattttacccatcgtacagctgaggaagcaaacagattaagtaacttgcccaaaccagtaaatagcagacctcagactgccacccactgtccttttataatacaatttacagctatattttactttaagcaattcttttattcaaaaaccatttattaagtgcccttgcaatatcaatcgctgtgccaggcattgaatctacagatgtgagcaagacaaagtacctgtcctcaaggagctcatagtataatgaggagattaacaagaaaatgtattattacaatttagtccagtgtcatagcataaggatgatgcgaggggaaaacccgagcagtgttgccaagaggaggaaataggccaatgtggtctgggacggttggatatacttaaacatcttaataatcagagtaattttcatttacaaagagaggtcggtacttaaaataaccctgaaaaataacactggaattccttttctagcattatatttattcctgatttgcctttgccatataatctaatgcttgtttatatagtgtctggtattgtttaacagttctgtcttttctatttaaatgccactaaattttaaattcatacctttccatgattcaaaattcaaaagatcccatgggagatggttggaaaatctccacttcatcctccaagccattcaagtttcctttccagaagcaactgctactgcctttcattcatatgttcttctaaagatagtctacatttggaaatgtatgttaaaagcacgtatttttaaaatttttttcctaaatagtaacacattgtatgtctgctgtgtactttgctatttttatttattttagtgtttcttatatagcagatggaatgaatttgaagttcccagggctgaggatccatgccttctttgtttctaagttatctttcccatagcttttcattatctttcatatgatccagtatatgttaaatatgtcctacatatacatttagacaaccaccatttgttaagtatttgctctaggacagagtttggatttgtttatgtttgctcaaaaggagacccatgggctctccagggtgcactgagtcaatctagtcctaaaaagcaatcttattattaactctgtatgacagaatcatgtctggaacttttgttttctgctttctgtcaagtataaacttcactttgatgctgtacttgcaaaatcacattttctttctggaaattccggcagtgtaccttgactgctagctaccctgtgccagaaaagcctcattcgttgtgcttgaacccttgaatgccaccagctgtcatcactacacagccctcctaagaggcttcctggaggtttcgagattcagatgccctgggagatcccagagtttcctttccctcttggccatattctggtgtcaatgacaaggagtaccttggctttgccacatgtcaaggctgaagaaacagtgtctccaacagagctccttgtgttatctgtttgtacatgtgcatttgtacagtaattggtgtgacagtgttctttgtgtgaattacaggcaagaattgtggctgagcaaggcacatagtctactcagtctattcctaagtcctaactcctccttgtggtgttggatttgtaaggcactttatcccttttgtctcatgtttcatcgtaaatggcataggcagagatgatacctaattctgcatttgattgtcactttttgtacctgcattaatttaataaaatattcttatttattttgttacttggtacaccagcatgtccattttcttgtttattttgtgtttaataaaatgttcagtttaacatcccagtggagaaagttaaaaaa

SEQ ID NO: 145 - DNA, 2122 bp, Homo sapiens; identical to SEQ ID NO: 6

SEQ ID NO: 146 - DNA, 2024 bp, Homo sapiens
aaggcaagagatctaggacttctagcccctgaactttcagccgaatacatcttttccaaaggagtgaattcaggcccttgtatcactggcagcaggacgtgaccatggagaagctgttgtgtttcttggtcttgaccagcctctctcatgcttttggccagacagacatgtcgaggaaggcttttgtgtttcccaaagagtcggatacttcctatgtatccctcaaagcaccgttaacgaagcctctcaaagccttcactgtgtgcctccacttctacacggaactgtcctcgacccgtgggtacagtattttctcgtatgccaccaagagacaagacaatgagattctcatattttggtctaaggatataggatacagttttacagtgggtgggtctgaaatattattcgaggttcctgaagtcacagtagctccagtacacatttgtacaagctgggagtccgcctcagggatcgtggagttctgggtagatgggaagcccagggtgaggaagagtctgaagaagggatacactgtgggggcagaagcaagcatcatcttggggcaggagcaggattccttcggtgggaactttgaaggaagccagtccctggtgggagacattggaaatgtgaacatgtgggactttgtgctgtcaccagatgagattaacaccatctatcttggcgggcccttcagtcctaatgtcctgaactggcgggcactgaagtatgaagtgcaaggcgaagtgttcaccaaaccccagctgtggccctgaggcccagctgtgggtcctgaaggtacctcccggttttttacaccgcatgggccccacgtctctgtctctggtacctcccgcttttttacactgcatggttcccacgtctctgtctctgggcctttgttcccctatatgcattgcaggcctgctccaccctcctcagcgcctgagaatggaggtaaagtgtctggtctgggagctcgttaactatgctgggaaacggtccaaaagaatcagaatttgaggtgttttgttttcatttttatttcaagttggacagatcttggagataatttcttacctcacatagatgagaaaactaacacccagaaaggagaaatgatgttataaaaaactcataaggcaagagctgagaaggaagcgctgatcttctatttaattccccacccatgacccccagaaagcaggagggcattgcccacattcacagggctcttcagtctcagaatcaggacactggccaggtgtctggtttgggtccagagtgctcatcatcatgtcatagaactgctgggcccaggtctcctgaaatgggaagcccagcaataccacgcagtccctccactttctcaaagcacactggaaaggccattagaattgccccagcagagcagatctgctttttttccagagcaaaatgaagcactaggtataaatatgttgttactgccaagaacttaaatgactggtttttgtttgcttgcagtgctttcttaattttatggctcttctgggaaactcctccccttttccacacgaaccttgtggggctgtgaattctttcttcatccccgcattcccaatatacccaggccacaagagtggacgtgaaccacagggtgtcctgtcagaggagcccatctcccatctccccagctccctatctggaggatagttggatagttacgtgttcctagcaggaccaactacagtcttcccaaggattgagttatggactttgggagtgagacatcttcttgctgctggatttccaagctgagaggacgtgaacctgggaccaccagtagccatcttgtttgccacatggagagagactgtgaggacagaagccaaactggaagtggaggagccaagggattgacaaacaacagagccttgaccacgtggagtctctgaatcagccttgtctggaaccagatctacacctggactgcccaggtctataagccaataaagcccctgtttacttgaaaaaaaaaa

SEQ ID NO: 147 - DNA, 6774 bp, Homo sapiens
cggccccagaaaacccgagcgagtagggggcggcgcgcaggagggaggagaactgggggcgcgggaggctggtgggtgtggggggtggagatgtagaagatgtgacgccgcggcccggcgggtgccagattagcggacgcggtgcccgcggttgcaacgggatcccgggcgctgcagcttgggaggcggctctccccaggcggcgtccgcggagacacccatccgtgaaccccaggtcccgggccgccggctcgccgcgcaccaggggccggcggacagaagagcggccgagcggctcgaggctgggggaccgcgggcgcggccgcgcgctgccgggcgggaggctggggggccggggccggggccgtgccccggagcgggtcggaggccggggccggggccgggggacggcggctccccgcgcggctccagcggctcggggatcccggccgggccccgcagggaccatggcagccgggagcatcaccacgctgcccgccttgcccgaggatggcggcagcggcgccttcccgcccggccacttcaaggaccccaagcggctgtactgcaaaaacgggggcttcttcctgcgcatccaccccgacggccgagttgacggggtccgggagaagagcgaccctcacatcaagctacaacttcaagcagaagagagaggagttgtgtctatcaaaggagtgtgtgctaaccgttacctggctatgaaggaagatggaagattactggcttctaaatgtgttacggatgagtgtttcttttttgaacgattggaatctaataactacaatacttaccggtcaaggaaatacaccagttggtatgtggcactgaaacgaactgggcagtataaacttggatccaaaacaggacctgggcagaaagctatactttttcttccaatgtctgctaagagctgattttaatggccacatctaatctcatttcacatgaaagaagaagtatattttagaaatttgttaatgagagtaaaagaaaataaatgtgtatagctcagtttggataattggtcaaacaattttttatccagtagtaaaatatgtaaccattgtcccagtaaagaaaaataacaaaagttgtaaaatgtatattctcccttttatattgcatctgctgttacccagtgaagcttacctagagcaatgatctttttcacgcatttgctttattcgaaaagaggcttttaaaatgtgcatgtttagaaacaaaatttcttcatggaaatcatatacattagaaaatcacagtcagatgtttaatcaatccaaaatgtccactatttcttatgtcattcgttagtctacatgtttctaaacatataaatgtgaatttaatcaattcctttcatagttttataattctctggcagttccttatgatagagtttataaaacagtcctgtgtaaactgctggaagttcttccacagtcaggtcaattttgtcaaacccttctctgtacccatacagcagcagcctagcaactctgctggtgatgggagttgtattttcagtcttcgccaggtcattgagatccatccactcacatcttaagcattcttcctggcaaaaatttatggtgaatgaatatggctttaggcggcagatgatatacatatctgacttcccaaaagctccaggatttgtgtgctgttgccgaatactcaggacggacctgaattctgattttataccagtctcttcaaaaacttctcgaaccgctgtgtctcctacgtaaaaaaagagatgtacaaatcaataataattacacttttagaaactgtatcatcaaagattttcagttaaagtagcattatgtaaaggctcaaaacattaccctaacaaagtaaagttttcaatacaaattctttgccttgtggatatcaagaaatcccaaaatattttcttaccactgtaaattcaagaagcttttgaaatgctgaatatttctttggctgctacttggaggcttatctacctgtacatttttggggtcagctctttttaacttcttgctgctctttttcccaaaaggtaaaaatatagattgaaaagttaaaacattttgcatggctgcagttcctttgtttcttgagataagattccaaagaacttagattcatttcttcaacaccgaaatgctggaggtgtttgatcagttttcaagaaacttggaatataaataattttataattcaacaaaggttttcacattttataaggttgatttttcaattaaatgcaaatttgtgtggcaggatttttattgccattaacatatttttgtggctgctttttctacacatccagatggtccctctaactgggctttctctaattttgtgatgttctgtcattgtctcccaaagtatttaggagaagccctttaaaaagctgccttcctctaccactttgctggaaagcttcacaattgtcacagacaaagatttttgttccaatactcgttttgcctctatttttcttgtttgtcaaatagtaaatgatatttgcccttgcagtaattctactggtgaaaaacatgcaaagaagaggaagtcacagaaacatgtctcaattcccatgtgctgtgactgtagactgtcttaccatagactgtcttacccatcccctggatatgctcttgttttttccctctaatagctatggaaagatgcatagaaagagtataatgttttaaaacataaggcattcgtctgccatttttcaattacatgctgacttcccttacaattgagatttgcccataggttaaacatggttagaaacaactgaaagcataaaagaaaaatctaggccgggtgcagtggctcatgcctatattccctgcactttgggaggccaaagcaggaggatcgcttgagcccaggagttcaagaccaacctggtgaaaccccgtctctacaaaaaaacacaaaaaatagccaggcatggtggcgtgtacatgtggtctcagatacttgggaggctgaggtgggagggttgatcacttgaggctgagaggtcaaggttgcagtgagccataatcgtgccactgcagtccagcctaggcaacagagtgagactttgtctcaaaaaaagagaaattttccttaataagaaaagtaatttttactctgatgtgcaatacatttgttattaaatttattatttaagatggtagcactagtcttaaattgtataaaatatcccctaacatgtttaaatgtccatttttattcattatgctttgaaaaataattatggggaaatacatgtttgttattaaatttattattaaagatagtagcactagtcttaaatttgatataacatctcctaacttgtttaaatgtccatttttattctttatgtttgaaaataaattatggggatcctatttagctcttagtaccactaatcaaaagttcggcatgtagctcatgatctatgctgtttctatgtcgtggaagcaccggatgggggtagtgagcaaatctgccctgctcagcagtcaccatagcagctgactgaaaatcagcactgcctgagtagttttgatcagtttaacttgaatcactaactgactgaaaattgaatgggcaaataagtgcttttgtctccagagtatgcgggagacccttccacctcaagatggatatttcttccccaaggatttcaagatgaattgaaatttttaatcaagatagtgtgctttattctgttgtattttttattattttaatatactgtaagccaaactgaaataacatttgctgttttataggtttgaagaacataggaaaaactaagaggttttgtttttatttttgctgatgaagagatatgtttaaatatgttgtattgttttgtttagttacaggacaataatgaaatggagtttatatttgttatttctattttgttatatttaataatagaattagattgaaataaaatataatgggaaataatctgcagaatgtgggttttcctggtgtttccctctgactctagtgcactgatgatctctgataaggctcagctgctttatagttctctggctaatgcagcagatactcttcctgccagtggtaatacgattttttaagaaggcagtttgtcaattttaatcttgtggatacctttatactcttagggtattattttatacaaaagccttgaggattgcattctattttctatatgaccctcttgatatttaaaaaacactatggataacaattcttcatttacctagtattatgaaagaatgaaggagttcaaacaaatgtgtttcccagttaactagggtttactgtttgagccaatataaatgtttaactgtttgtgatggcagtattcctaaagtacattgcatgttttcctaaatacagagtttaaataatttcagtaattcttagatgattcagcttcatcattaagaatatcttttgttttatgttgagttagaaatgccttcatatagacatagtctttcagacctctactgtcagttttcatttctagctgctttcagggttttatgaattttcaggcaaagctttaatttatactaagcttaggaagtatggctaatgccaacggcagtttttttcttcttaattccacatgactgaggcatatatgatctctgggtaggtgagttgttgtgacaaccacaagcactttttttttttttaaagaaaaaaaggtagtgaatttttaatcatctggactttaagaaggattctggagtatacttaggcctgaaattatatatatttggcttggaaatgtgtttttcttcaattacatctacaagtaagtacagctgaaattcagaggacccataagagttcacatgaaaaaaatcaatttatttgaaaaggcaagatgcaggagagaggaagccttgcaaacctgcagactgctttttgcccaatatagattgggtaaggctgcaaaacataagcttaattagctcacatgctctgctctcacgtggcaccagtggatagtgtgagagaattaggctgtagaacaaatggccttctctttcagcattcacaccactacaaaatcatcttttatatcaacagaagaataagcataaactaagcaaaaggtcaataagtacctgaaaccaagattggctagagatatatcttaatgcaatccattttctgatggattgttacgagttggctatataatgtatgtatggtattttgatttgtgtaaaagttttaaaaatcaagctttaagtacatggacatttttaaataaaatatttaaagacaatttagaaaattgccttaatatcattgttggctaaatagaataggggacatgcatattaaggaaaaggtcatggagaaataatattggtatcaaacaaatacattgatttgtcatgatacacattgaatttgatccaatagtttaaggaataggtaggaaaatttggtttctatttttcgatttcctgtaaatcagtgacataaataattcttagcttattttatatttccttgtcttaaatactgagctcagtaagttgtgttaggggattatttctcagttgagactttcttatatgacattttactatgttttgacttcctgactattaaaaataaatagtagatacaattttcataaagtgaagaattatataatcactgctttataactgactttattatatttatttcaaagttcatttaaaggctactattcatcctctgtgatggaatggtcaggaatttgttttctcatagtttaattccaacaacaatattagtcgtatccaaaataacctttaatgctaaactttactgatgtatatccaaagcttctcattttcagacagattaatccagaagcagtcataaacagaagaataggtggtatgttcctaatgatattatttctactaatggaataaactgtaatattagaaattatgctgctaattatatcagctctgaggtaatttctgaaatgttcagactcagtcggaacaaattggaaaatttaaatttttattcttagctataaagcaagaaagtaaacacattaatttcctcaacatttttaagccaattaaaaatataaaagatacacaccaatatcttcttcaggctctgacaggcctcctggaaacttccacatatttttcaactgcagtataaagtcagaaaataaagttaacataactttcactaacacacacatatgtagatttcacaaaatccacctataattggtcaaagtggttgagaatatattttttagtaattgcatgcaaaatttttctagcttccatcctttctccctcgtttcttctttttttgggggagctggtaactgatgaaatcttttcccaccttttctcttcaggaaatataagtggttttgtttggttaacgtgatacattctgtatgaatgaaacattggagggaaacatctactgaatttctgtaatttaaaatattttgctgctagttaactatgaacagatagaagaatcttacagatgctgctataaataagtagaaaatataaatttcatcactaaaatatgctattttaaaatctatttcctatattgtatttctaatcagatgtattactcttattatttctattgtatgtgttaatgattttatgtaaaaatgtaattgcttttcatgagtagtatgaataaaattgattagtttgtgttttcttgtctccc

SEQ ID NO: 148 - DNA, 2158 bp, Homo sapiens
attcataaaacgcttgttataaaagcagtggctgcggcgcctcgtactccaaccgcatctgcagcgagcatctgagaagccaagactgagccggcggccgcggcgcagcgaacgagcagtgaccgtgctcctacccagctctgctccacagcgcccacctgtctccgcccctcggcccctcgcccggctttgcctaaccgccacgatgatgttctcgggcttcaacgcagactacgaggcgtcatcctcccgctgcagcagcgcgtccccggccggggatagcctctcttactaccactcacccgcagactccttctccagcatgggctcgcctgtcaacgcgcaggacttctgcacggacctggccgtctccagtgccaacttcattcccacggtcactgccatctcgaccagtccggacctgcagtggctggtgcagcccgccctcgtctcctccgtggccccatcgcagaccagagcccctcaccctttcggagtccccgccccctccgctggggcttactccagggctggcgttgtgaagaccatgacaggaggccgagcgcagagcattggcaggaggggcaaggtggaacagttatctccagaagaagaagagaaaaggagaatccgaagggaaaggaataagatggctgcagccaaatgccgcaaccggaggagggagctgactgatacactccaagcggagacagaccaactagaagatgagaagtctgctttgcagaccgagattgccaacctgctgaaggagaaggaaaaactagagttcatcctggcagctcaccgacctgcctgcaagatccctgatgacctgggcttcccagaagagatgtctgtggcttcccttgatctgactgggggcctgccagaggttgccaccccggagtctgaggaggccttcaccctgcctctcctcaatgaccctgagcccaagccctcagtggaacctgtcaagagcatcagcagcatggagctgaagaccgagccctttgatgacttcctgttcccagcatcatccaggcccagtggctctgagacagcccgctccgtgccagacatggacctatctgggtccttctatgcagcagactgggagcctctgcacagtggctccctggggatggggcccatggccacagagctggagcccctgtgcactccggtggtcacctgtactcccagctgcactgcttacacgtcttccttcgtcttcacctaccccgaggctgactccttccccagctgtgcagctgcccaccgcaagggcagcagcagcaatgagccttcctctgactcgctcagctcacccacgctgctggccctgtgagggggcagggaaggggaggcagccggcacccacaagtgccactgcccgagctggtgcattacagagaggagaaacacatcttccctagagggttcctgtagacctagggaggaccttatctgtgcgtgaaacacaccaggctgtgggcctcaaggacttgaaagcatccatgtgtggactcaagtccttacctcttccggagatgtagcaaaacgcatggagtgtgtattgttcccagtgacacttcagagagctggtagttagtagcatgttgagccaggcctgggtctgtgtctcttttctctttctccttagtcttctcatagcattaactaatctattgggttcattattggaattaacctggtgctggatattttcaaattgtatctagtgcagctgattttaacaataactactgtgttcctggcaatagtgtgttctgattagaaatgaccaatattatactaagaaaagatacgactttattttctggtagatagaaataaatagctatatccatgtactgtagtttttcttcaacatcaatgttcattgtaatgttactgatcatgcattgttgaggtggtctgaatgttctgacattaacagttttccatgaaaacgttttattgtgtttttaatttatttattaagatggattctcagatatttatatttttattttatttttttctaccttgaggtcttttgacatgtggaaagtgaatttgaatgaaaaatttaagcattgtttgcttattgttccaagacattgtcaataaaagcatttaagttgaatgcgaccaa

SEQ ID NO: 149 - DNA, 2812 bp, Homo sapiens
agctgggctttgtggagcgctgcggagggtgcgtgcgggccgcggcagccgaacaaaggagcaggggcgccgccgcagggacccgccacccacctcccggggccgcgcagcggcctctcgtctactgccaccatgaccgccaacggcacagccgaggcggtgcagatccagttcggcctcatcaactgcggcaacaagtacctgacggccgaggcgttcgggttcaaggtgaacgcgtccgccagcagcctgaagaagaagcagatctggacgctggagcagccccctgacgaggcgggcagcgcggccgtgtgcctgcgcagccacctgggccgctacctggcggcggacaaggacggcaacgtgacctgcgagcgcgaggtgcccggtcccgactgccgtttcctcatcgtggcgcacgacgacggtcgctggtcgctgcagtccgaggcgcaccggcgctacttcggcggcaccgaggaccgcctgtcctgcttcgcgcagacggtgtcccccgccgagaagtggagcgtgcacatcgccatgcaccctcaggtcaacatctacagcgtcacccgtaagcgctacgcgcacctgagcgcgcggccggccgacgagatcgccgtggaccgcgacgtgccctggggcgtcgactcgctcatcaccctcgccttccaggaccagcgctacagcgtgcagaccgccgaccaccgcttcctgcgccacgacgggcgcctggtggcgcgccccgagccggccactggctacacgctggagttccgctccggcaaggtggccttccgcgactgcgagggccgttacctggcgccgtcggggcccagcggcacgctcaaggcgggcaaggccaccaaggtgggcaaggacgagctctttgctctggagcagagctgcgcccaggtcgtgctgcaggcggccaacgagaggaacgtgtccacgcgccagggtatggacctgtctgccaatcaggacgaggagaccgaccaggagaccttccagctggagatcgaccgcgacaccaaaaagtgtgccttccgtacccacacgggcaagtactggacgctgacggccaccgggggcgtgcagtccaccgcctccagcaagaatgccagctgctactttgacatcgagtggcgtgaccggcgcatcacactgagggcgtccaatggcaagtttgtgacctccaagaagaatgggcagctggccgcctcggtggagacagcaggggactcagagctcttcctcatgaagctcatcaaccgccccatcatcgtgttccgcggggagcatggcttcatcggctgccgcaaggtcacgggcaccctggacgccaaccgctccagctatgacgtcttccagctggagttcaacgatggcgcctacaacatcaaagactccacaggcaaatactggacggtgggcagtgactccgcggtcaccagcagcggcgacactcctgtggacttcttcttcgagttctgcgactataacaaggtggccatcaaggtgggcgggcgctacctgaagggcgaccacgcaggcgtcctgaaggcctcggcggaaaccgtggaccccgcctcgctctgggagtactagggccggcccgtccttccccgcccctgcccacatggcggctcctgccaaccctccctgctaaccccttctccgccaggtgggctccagggcgggaggcaagcccccttgcctttcaaactggaaaccccagagaaaacggtgcccccacctgtcgcccctatggactccccactctcccctccgcccgggttccctactcccctcgggtcagcggctgcggcctggccctgggagggatttcagatgcccctgccctcttgtctgccacggggcgagtctggcacctctttcttctgacctcagacggctctgagccttatttctctggaagcggctaagggacggttgggggctgggagccctgggcgtgtagtgtaactggaatcttttgcctctcccagccacctcctcccagccccccaggagagctgggcacatgtcccaagcctgtcagtggccctccctggtgcactgtccccgaaacccctgcttgggaagggaagctgtcgggtgggctaggactgacccttgtggtgtttttttgggtggtggctggaaacagcccctctcccacgtggcagaggctcagcctggctcccttccctggagcggcagggcgtgacggccacagggtctgcccgctgcacgttctgccaaggtggtggtggcgggcgggtaggggtgtgggggccgtcttcctcctgtctctttcctttcaccctagcctgactggaagcagaaaatgaccaaatcagtattttttttaatgaaatattattgctggaggcgtcccaggcaagcctggctgtagtagcgagtgatctggcggggggcgtctcagcaccctccccagggggtgcatctcagccccctctttccgtccttcccgtccagccccagccctgggcctgggctgccgacacctgggccagagcccctgctgtgattggtgctccctgggcctcccgggtggatgaagccaggcgtcgccccctccgggagccctggggtgagccgccggggcccccctgctgccagcctcccccgtccccaacatgcatctcactctgggtgtcttggtcttttattttttgtaagtgtcatttgtataactctaaacgcccatgatagtagcttcaaactggaaatagcgaaataaaataactcagtctgcagccccagaaaaaaaaaaaaaaaa

SEQ ID NO: 150 - DNA, 1690 bp, Homo sapiens
gcaggcagggggttcgtgacgccggctgggtctgggggctgtgggccagccgagccgacccgggcttctgggggaccgcgggggccgtgagcactcagagggcgcatcccaggcccctccggggacccggccagcctgaagatgccgacgaacggcctgcaccaggtgctgaagatccagtttggcctcgtcaacgacactgaccgctacctgacagctgagagcttcggcttcaaggtcaatgcctcggcacccagcctcaagaggaagcagacctgggtgctggaacccgacccaggacaaggcacggctgtgctgctccgcagcagccacctgggccgctacctgtcggcagaagaggacgggcgcgtggcctgtgaggcagagcagccgggccgtgactgccgcttcctggtcctgccgcagccagatgggcgctgggtgctgcggtccgagccgcacggccgcttcttcggaggcaccgaggaccagctgtcctgcttcgccacagccgtttccccggccgagctgtggaccgtgcacctggccatccacccgcaggcccacctgctgagcgtgagccggcggcgctacgtgcacctgtgcccgcgggaggacgagatggccgcagacggagacaagccctggggcgtggacgccctcctcaccctcatcttccggagccgacggtactgcctcaagtcctgtgacagccgctacctgcgcagcgacggccgtctggtctgggagcctgagccccgtgcctgctacacgctggagttcaaggcgggcaagctggccttcaaggactgcgacggccactacctggcacccgtggggcccgcaggcaccctcaaggccggccgaaacacgcgacctggcaaggatgagctctttgatctggaggagagtcacccacaggtggtgctggtggctgccaaccaccgctacgtctctgtgcggcaaggggtcaacgtctcagccaatcaggatgatgaactagaccacgagaccttcctgatgcaaattgaccaggagacaaagaagtgcaccttctattccagcactgggggctactggaccctggtcacccatgggggcattcacgccacagccacacaagtttctgccaacaccatgtttgagatggagtggcgtggccggcgggtagcactcaaagccagcaacgggcgctacgtgtgcatgaagaagaatgggcagctggcggctatcagcgattttgtcggcaaggacgaagagttcaccctcaagctcatcaaccggcccatcctggtgctgcgcggcctggacggcttcgtctgccaccaccgcggctccaaccagctggacaccaaccgctccgtctacgacgtcttccacctgagcttcagcgacggcgcctaccggatccgaggccgcgacggagggttctggtacacgggcagccacggcagcgtgtgcagcgacggcgaacgcgccgaggacttcgtcttcgagttccgtgagcgcggccgcctggccatccgcgcccggagcggcaagtacctgcgcggcggcgcctcgggcctgctgcgggccgatgccgacgccccggccgggaccgcgctttgggagtactgaggccgcgcccagaccagcctgtcgcgcattaaaaccgtgtctctcccgcaaaaaaaaaaaaaaaaaaaaa

SEQ ID NO: 151 - DNA, 1911 bp, Homo sapiens
ccctttccccactgtggtgtgataagaggctgccctcacagtcacaatgctcccgggtcacagaggtgctgggccccaggccagcctctgcctgggaagttctctctgggaacatctggtgggtactacaggccctattccaggccctatggcctgtggaacctcaccacgggggggagggctgggccagacggagacatcacctgtggtgtcagccccatggatgagacagagtggatacacagacatcccaaggctgaggacctaagggttgggctcatcagctgggcaggaacctacctcacctttgaggcatgcaagaatacagtcactgcaactgcgaagagtttgggcaggagacagacctgggagatcttggtgagcaatgagcatgagacacaggccgtggtgcgactaaagagcgtgcagggcctctacctgctgtgtgagtgtgatggcaccgtgtgttatggccgcccaaggaccagccaccatgggtgctttctactgcgtttccaccggaacagcaagtggaccctccagtgcctaatctctggtcgttatttggagtccaatggcaaggacgtgttttgcacttcccacgtcctctcagcttaccacatgtggaccccccgaccagccctccatgtccacgtgatcctctacagccccatccaccgctgctatgcccgggctgaccccactatgggccgcatctgggtggacgcagcagttccctgcctggaggagtgtggcttcctgttgcatttccgagatggatgctaccacctggagacctctacacaccacttcttgtcccatgtagaccggctgttctcccaaccctcatcacagacagcttttcacatgcaagtgcggcctggagggcttgtggcactgtgtgatggagaaggaggcatgttatatccacagggcacgcatctgctcttgggcatgggctgcaaccccatgaggggtgaggagtggttcatcctacagcactgcccaacctgggtcagcctcaggtcaaagactgggcggttcatctcagtcatctacgatggtgaggtgcgtgctgcttctgagcgcttaaaccgaatgtccttgttccagtttgaatgtgacagtgagagccccactgtgcagcttcgttcagccaatggctactacctatcccagaggcgccacagggcagtaatggctgatgggcaccccctggagtctgacacgttcttccgaatgcactggaactgtggcaggatcatcctgcagtcctgcagggggcgcttcctgggcattgcacccaacagcctgctgatggccaatgtcatccttccaggcccaaatgaggaatttgggattttatttgccaatcgctccttccttgtattgcgaggtcgttatggctatgtgggctcctcatcgggccatgacctcatacagtgcaaccaggatcagcccgaccgcattcatctactaccctgccgaccgggtatctaccacttccaggcacaggggggatccttctggtcaataacatcctttggcacctttcgcccttggggcaagtttgccctcaacttctgtatcgagcttcaggggagcaacttactcactgtactggcccccaatggcttctacatgcgagccgaccaaagtggcaccctgttggcagacagtgaagacattaccagagagtgtatctgggaattttaggtcaatgggatgtcacctaccaaaatccaaatcctccaggaaaaactactacactaaatggaccaggaacctcagagtcaagatccaagagaagaacatctgttacaacttttcctacccagtttagcaaaacacctgttttatgcaacaatacatcacaacaggccacccccaaaaaaaaaaaaaaaaaaaaaa

SEQ ID NO: 152 - DNA, 4082 bp, Homo sapiens
gcgcgcgccggcctgggcaggcgagcgggcgcgctcccgccccctctcccctccccgcgcgcccgagcgcgcctccgcccttgcccgccccctgacgctgcctcagctcctcagtgcacagtgctgcctcgtctgaggggacaggaggatcaccctcttcgtcgcttcggccagtgtgtcgggctgggccctgacaagccacctgaggagaggctcggagccgggcccggaccccggcgattgccgcccgcttctctctagtctcacgaggggtttcccgcctcgcacccccacctctggacttgcctttccttctcttctccgcgtgtggagggagccagcgcttaggccggagcgagcctgggggccgcccgccgtgaagacatcgcggggaccgattcaccatggagggcgccggcggcgcgaacgacaagaaaaagataagttctgaacgtcgaaaagaaaagtctcgagatgcagccagatctcggcgaagtaaagaatctgaagttttttatgagcttgctcatcagttgccacttccacataatgtgagttcgcatcttgataaggcctctgtgatgaggcttaccatcagctatttgcgtgtgaggaaacttctggatgctggtgatttggatattgaagatgacatgaaagcacagatgaattgcttttatttgaaagccttggatggttttgttatggttctcacagatgatggtgacatgatttacatttctgataatgtgaacaaatacatgggattaactcagtttgaactaactggacacagtgtgtttgattttactcatccatgtgaccatgaggaaatgagagaaatgcttacacacagaaatggccttgtgaaaaagggtaaagaacaaaacacacagcgaagcttttttctcagaatgaagtgtaccctaactagccgaggaagaactatgaacataaagtctgcaacatggaaggtattgcactgcacaggccacattcacgtatatgataccaacagtaaccaacctcagtgtgggtataagaaaccacctatgacctgcttggtgctgatttgtgaacccattcctcacccatcaaatattgaaattcctttagatagcaagactttcctcagtcgacacagcctggatatgaaattttcttattgtgatgaaagaattaccgaattgatgggatatgagccagaagaacttttaggccgctcaatttatgaatattatcatgctttggactctgatcatctgaccaaaactcatcatgatatgtttactaaaggacaagtcaccacaggacagtacaggatgcttgccaaaagaggtggatatgtctgggttgaaactcaagcaactgtcatatataacaccaagaattctcaaccacagtgcattgtatgtgtgaattacgttgtgagtggtattattcagcacgacttgattttctcccttcaacaaacagaatgtgtccttaaaccggttgaatcttcagatatgaaaatgactcagctattcaccaaagttgaatcagaagatacaagtagcctctttgacaaacttaagaaggaacctgatgctttaactttgctggccccagccgctggagacacaatcatatctttagattttggcagcaacgacacagaaactgatgaccagcaacttgaggaagtaccattatataatgatgtaatgctcccctcacccaacgaaaaattacagaatataaatttggcaatgtctccattacccaccgctgaaacgccaaagccacttcgaagtagtgctgaccctgcactcaatcaagaagttgcattaaaattagaaccaaatccagagtcactggaactttcttttaccatgccccagattcaggatcagacacctagtccttccgatggaagcactagacaaagttcacctgagcctaatagtcccagtgaatattgtttttatgtggatagtgatatggtcaatgaattcaagttggaattggtagaaaaactttttgctgaagacacagaagcaaagaacccattttctactcaggacacagatttagacttggagatgttagctccctatatcccaatggatgatgacttccagttacgttccttcgatcagttgtcaccattagaaagcagttccgcaagccctgaaagcgcaagtcctcaaagcacagttacagtattccagcagactcaaatacaagaacctactgctaatgccaccactaccactgccaccactgatgaattaaaaacagtgacaaaagaccgtatggaagacattaaaatattgattgcatctccatctcctacccacatacataaagaaactactagtgccacatcatcaccatatagagatactcaaagtcggacagcctcaccaaacagagcaggaaaaggagtcatagaacagacagaaaaatctcatccaagaagccctaacgtgttatctgtcgctttgagtcaaagaactacagttcctgaggaagaactaaatccaaagatactagctttgcagaatgctcagagaaagcgaaaaatggaacatgatggttcactttttcaagcagtaggaattggaacattattacagcagccagacgatcatgcagctactacatcactttcttggaaacgtgtaaaaggatgcaaatctagtgaacagaatggaatggagcaaaagacaattattttaataccctctgatttagcatgtagactgctggggcaatcaatggatgaaagtggattaccacagctgaccagttatgattgtgaagttaatgctcctatacaaggcagcagaaacctactgcagggtgaagaattactcagagctttggatcaagttaactgagctttttcttaatttcattcctttttttggacactggtggctcattacctaaagcagtctatttatattttctacatctaattttagaagcctggctacaatactgcacaaacttggttagttcaattttgatcccctttctacttaatttacattaatgctcttttttagtatgttctttaatgctggatcacagacagctcattttctcagttttttggtatttaaaccattgcattgcagtagcatcattttaaaaaatgcacctttttatttatttatttttggctagggagtttatccctttttcgaattatttttaagaagatgccaatataatttttgtaagaaggcagtaacctttcatcatgatcataggcagttgaaaaatttttacaccttttttttcacattttacataaataataatgctttgccagcagtacgtggtagccacaattgcacaatatattttcttaaaaaataccagcagttactcatggaatatattctgcgtttataaaactagtttttaagaagaaattttttttggcctatgaaattgttaaacctggaacatgacattgttaatcatataataatgattcttaaatgctgtatggtttattatttaaatgggtaaagccatttacataatatagaaagatatgcatatatctagaaggtatgtggcatttatttggataaaattctcaattcagagaaatcatctgatgtttctatagtcactttgccagctcaaaagaaaacaataccctatgtagttgtggaagtttatgctaatattgtgtaactgatattaaacctaaatgttctgcctaccctgttggtataaagatattttgagcagactgtaaacaagaaaaaaaaaatcatgcattcttagcaaaattgcctagtatgttaatttgctcaaaatacaatgtttgattttatgcactttgtcgctattaacatcctttttttcatgtagatttcaataattgagtaattttagaagcattattttaggaatatatagttgtcacagtaaatatcttgttttttctatgtacattgtacaaatttttcattccttttgctctttgtggttggatctaacactaactgtattgttttgttacatcaaataaacatcttctgtggaccaggcaaaaaaaaaaaaaaaaaaaaaaa

SEQ ID NO: 153 - DNA, 3366 bp, Homo sapiens
gcatgcgtaggcgcgcggccgcggcggcggctggggagggttcttccggaaggttcgggaggcttctggaaaaagcgccgcgcgctgggcgggcccgtcgctatataaggcaggcgcgggggtggcgcgtcagttgcttcagcgtcccggtgtggctgtgccgttggtcctgtgcggtcacttagccaagatgcctgaggaaacccagacccaagaccaaccgatggaggaggaggaggttgagacgttcgcctttcaggcagaaattgcccagttgatgtcattgatcatcaatactttctactcgaacaaagagatctttctgagagagctcatttcaaattcatcagatgcattggacaaaatccggtatgaaagcttgacagatcccagtaaattagactctgggaaagagctgcatattaaccttataccgaacaaacaagatcgaactctcactattgtggatactggaattggaatgaccaaggctgacttgatcaataaccttggtactatcgccaagtctgggaccaaagcgttcatggaagctttgcaggctggtgcagatatctctatgattggccagttcggtgttggtttttattctgcttatttggttgctgagaaagtaactgtgatcaccaaacataacgatgatgagcagtacgcttgggagtcctcagcagggggatcattcacagtgaggacagacacaggtgaacctatgggtcgtggaacaaaagttatcctacacctgaaagaagaccaaactgagtacttggaggaacgaagaataaaggagattgtgaagaaacattctcagtttattggatatcccattactctttttgtggagaaggaacgtgataaagaagtaagcgatgatgaggctgaagaaaaggaagacaaagaagaagaaaaagaaaaagaagagaaagagtcggaagacaaacctgaaattgaagatgttggttctgatgaggaagaagaaaagaaggatggtgacaagaagaagaagaagaagattaaggaaaagtacatcgatcaagaagagctcaacaaaacaaagcccatctggaccagaaatcccgacgatattactaatgaggagtacggagaattctataagagcttgaccaatgactgggaagatcacttggcagtgaagcatttttcagttgaaggacagttggaattcagagcccttctatttgtcccacgacgtgctccttttgatctgtttgaaaacagaaagaaaaagaacaacatcaaattgtatgtacgcagagttttcatcatggataactgtgaggagctaatccctgaatatctgaacttcattagaggggtggtagactcggaggatctccctctaaacatatcccgtgagatgttgcaacaaagcaaaattttgaaagttatcaggaagaatttggtcaaaaaatgcttagaactctttactgaactggcggaagataaagagaactacaagaaattctatgagcagttctctaaaaacataaagcttggaatacacgaagactctcaaaatcggaagaagctttcagagctgttaaggtactacacatctgcctctggtgatgagatggtttctctcaaggactactgcaccagaatgaaggagaaccagaaacatatctattatatcacaggtgagaccaaggaccaggtagctaactcagcctttgtggaacgtcttcggaaacatggcttagaagtgatctatatgattgagcccattgatgagtactgtgtccaacagctgaaggaatttgaggggaagactttagtgtcagtcaccaaagaaggcctggaacttccagaggatgaagaagagaaaaagaagcaggaagagaaaaaaacaaagtttgagaacctctgcaaaatcatgaaagacatattggagaaaaaagttgaaaaggtggttgtgtcaaaccgattggtgacatctccatgctgtattgtcacaagcacatatggctggacagcaaacatggagagaatcatgaaagctcaagccctaagagacaactcaacaatgggttacatggcagcaaagaaacacctggagataaaccctgaccattccattattgagaccttaaggcaaaaggcagaggctgataagaacgacaagtctgtgaaggatctggtcatcttgctttatgaaactgcgctcctgtcttctggcttcagtctggaagatccccagacacatgctaacaggatctacaggatgatcaaacttggtctgggtattgatgaagatgaccctactgctgatgataccagtgctgctgtaactgaagaaatgccaccccttgaaggagatgacgacacatcacgcatggaagaagtagactaatctctggctgagggatgacttacctgttcagtactctacaattcctctgataatatattttcaaggatgtttttctttatttttgttaatattaaaaagtctgtatggcatgacaactactttaaggggaagataagatttctgtctactaagtgatgctgtgataccttaggcactaaagcagagctagtaatgctttttgagtttcatgttggtttattttcacagattggggtaacgtgcactgtaagacgtatgtaacatgatgttaactttgtggtctaaagtgtttagctgtcaagccggatgcctaagtagaccaaatcttgttattgaagtgttctgagctgtatcttgatgtttagaaaagtattcgttacatcttgtaggatctactttttgaacttttcattccctgtagttgacaattctgcatgtactagtcctctagaaataggttaaactgaagcaacttgatggaaggatctctccacagggcttgttttccaaagaaaagtattgtttggaggagcaaagttaaaagcctacctaagcatatcgtaaagctgttcaaaaataactcagacccagtcttgtggatggaaatgtagtgctcgagtcacattctgcttaaagttgtaacaaatacagatgagttaaaagatattgtgtgacagtgtcttatttagggggaaaggggagtatctggatgacagttagtgccaaaatgtaaaacatgaggcgctagcaggagatggttaaacactagctgctccaagggttgacatggtcttcccagcatgtactcagcaggtgtggggtggagcacacgtaggcacagaaaacaggaatgcagacaacatgcatcccctgcgtccatgagttacatgtgttctcttagtgtccacgttgttttgatgttattcatggaataccttctgtgttaaatacagtcacttaattccttggccttaaaa

SEQ ID NO: 154 - DNA, 2703 bp, Homo sapiens
tttttcggaccatgacgtcaaggtgggctggtggcggcaggtgcggggttgacaatcatactcctttaaggcggagggatctacaggagggcggctgtactgtgcttcgccttatatagggcgacttggggcacgcagtagctctctcgagtcactccggcgcagtgttgggactgtctgggtatcggaaagcaagcctacgttgctcactattacgtataatccttttcttttcaagatgcctgaggaagtgcaccatggagaggaggaggtggagacttttgcctttcaggcagaaattgcccaactcatgtccctcatcatcaataccttctattccaacaaggagattttccttcgggagttgatctctaatgcttctgatgccttggacaagattcgctatgagagcctgacagacccttcgaagttggacagtggtaaagagctgaaaattgacatcatccccaaccctcaggaacgtaccctgactttggtagacacaggcattggcatgaccaaagctgatctcataaataatttgggaaccattgccaagtctggtactaaagcattcatggaggctcttcaggctggtgcagacatctccatgattgggcagtttggtgttggcttttattctgcctacttggtggcagagaaagtggttgtgatcacaaagcacaacgatgatgaacagtatgcttgggagtcttctgctggaggttccttcactgtgcgtgctgaccatggtgagcccattggcaggggtaccaaagtgatcctccatcttaaagaagatcagacagagtacctagaagagaggcgggtcaaagaagtagtgaagaagcattctcagttcataggctatcccatcaccctttatttggagaaggaacgagagaaggaaattagtgatgatgaggcagaggaagagaaaggtgagaaagaagaggaagataaagatgatgaagaaaaacccaagatcgaagatgtgggttcagatgaggaggatgacagcggtaaggataagaagaagaaaactaagaagatcaaagagaaatacattgatcaggaagaactaaacaagaccaagcctatttggaccagaaaccctgatgacatcacccaagaggagtatggagaattctacaagagcctcactaatgactgggaagaccacttggcagtcaagcacttttctgtagaaggtcagttggaattcagggcattgctatttattcctcgtcgggctccctttgacctttttgagaacaagaagaaaaagaacaacatcaaactctatgtccgccgtgtgttcatcatggacagctgtgatgagttgataccagagtatctcaattttatccgtggtgtggttgactctgaggatctgcccctgaacatctcccgagaaatgctccagcagagcaaaatcttgaaagtcattcgcaaaaacattgttaagaagtgccttgagctcttctctgagctggcagaagacaaggagaattacaagaaattctatgaggcattctctaaaaatctcaagcttggaatccacgaagactccactaaccgccgccgcctgtctgagctgctgcgctatcatacctcccagtctggagatgagatgacatctctgtcagagtatgtttctcgcatgaaggagacacagaagtccatctattacatcactggtgagagcaaagagcaggtggccaactcagcttttgtggagcgagtgcggaaacggggcttcgaggtggtatatatgaccgagcccattgacgagtactgtgtgcagcagctcaaggaatttgatgggaagagcctggtctcagttaccaaggagggtctggagctgcctgaggatgaggaggagaagaagaagatggaagagagcaaggcaaagtttgagaacctctgcaagctcatgaaagaaatcttagataagaaggttgagaaggtgacaatctccaatagacttgtgtcttcaccttgctgcattgtgaccagcacctacggctggacagccaatatggagcggatcatgaaagcccaggcacttcgggacaactccaccatgggctatatgatggccaaaaagcacctggagatcaaccctgaccaccccattgtggagacgctgcggcagaaggctgaggccgacaagaatgataaggcagttaaggacctggtggtgctgctgtttgaaaccgccctgctatcttctggcttttcccttgaggatccccagacccactccaaccgcatctatcgcatgatcaagctaggtctaggtattgatgaagatgaagtggcagcagaggaacccaatgctgcagttcctgatgagatcccccctctcgagggcgatgaggatgcgtctcgcatggaagaagtcgattaggttaggagttcatagttggaaaacttgtgcccttgtatagtgtccccatgggctcccactgcagcctcgagtgcccctgtcccacctggctccccctgctggtgtctagtgtttttttccctctcctgtccttgtgttgaaggcagtaaactaagggtgtcaagccccattccctctctactcttgacagcaggattggatgttgtgtattgtggtttattttattttcttcattttgttctgaaattaaagtatgcaaaataaagaatatgccgtttttatacagttct

SEQ ID NO: 155 - DNA, 2879 bp, Homo sapiens
gattggtgggttcatgtttcccgtcccccgcccgcgggaagtgggggtgaaaagcggcccgacctgcttgcggtgtagtgggcggaccgcgcggctggaggtgtgaggatccgaacccaggggtggggggtggaggcggctcctgcgatcgaaggggacttgagactcaccggccgcacgccatgagggccctgtgggtgctgggcctctgctgcgtcctgctgaccttcgggtcggtcagagctgacgatgaagttgatgtggatggtacagtagaagaggatctgggtaaaagtagagaaggatcaaggacggatgatgaagtagtacagagagaggaagaagctattcagttggatggattaaatgcatcacaaataagagaacttagagagaagtcggaaaagtttgccttccaagccgaagttaacagaatgatgaaacttatcatcaattcattgtataaaaataaagagattttcctgagagaactgatttcaaatgcttctgatgctttagataagataaggctaatatcactgactgatgaaaatgctctttctggaaatgaggaactaacagtcaaaattaagtgtgataaggagaagaacctgctgcatgtcacagacaccggtgtaggaatgaccagagaagagttggttaaaaaccttggtaccatagccaaatctgggacaagcgagtttttaaacaaaatgactgaagcacaggaagatggccagtcaacttctgaattgattggccagtttggtgtcggtttctattccgccttccttgtagcagataaggttattgtcacttcaaaacacaacaacgatacccagcacatctgggagtctgactccaatgaattttctgtaattgctgacccaagaggaaacactctaggacggggaacgacaattacccttgtcttaaaagaagaagcatctgattaccttgaattggatacaattaaaaatctcgtcaaaaaatattcacagttcataaactttcctatttatgtatggagcagcaagactgaaactgttgaggagcccatggaggaagaagaagcagccaaagaagagaaagaagaatctgatgatgaagctgcagtagaggaagaagaagaagaaaagaaaccaaagactaaaaaagttgaaaaaactgtctgggactgggaacttatgaatgatatcaaaccaatatggcagagaccatcaaaagaagtagaagaagatgaatacaaagctttctacaaatcattttcaaaggaaagtgatgaccccatggcttatattcactttactgctgaaggggaagttaccttcaaatcaattttatttgtacccacatctgctccacgtggtctgtttgacgaatatggatctaaaaagagcgattacattaagctctatgtgcgccgtgtattcatcacagacgacttccatgatatgatgcctaaatacctcaattttgtcaagggtgtggtggactcagatgatctccccttgaatgtttcccgcgagactcttcagcaacataaactgcttaaggtgattaggaagaagcttgttcgtaaaacgctggacatgatcaagaagattgctgatgataaatacaatgatactttttggaaagaatttggtaccaacatcaagcttggtgtgattgaagaccactcgaatcgaacacgtcttgctaaacttcttaggttccagtcttctcatcatccaactgacattactagcctagaccagtatgtggaaagaatgaaggaaaaacaagacaaaatctacttcatggctgggtccagcagaaaagaggctgaatcttctccatttgttgagcgacttctgaaaaagggctatgaagttatttacctcacagaacctgtggatgaatactgtattcaggcccttcccgaatttgatgggaagaggttccagaatgttgccaaggaaggagtgaagttcgatgaaagtgagaaaactaaggagagtcgtgaagcagttgagaaagaatttgagcctctgctgaattggatgaaagataaagcccttaaggacaagattgaaaaggctgtggtgtctcagcgcctgacagaatctccgtgtgctttggtggccagccagtacggatggtctggcaacatggagagaatcatgaaagcacaagcgtaccaaacgggcaaggacatctctacaaattactatgcgagtcagaagaaaacatttgaaattaatcccagacacccgctgatcagagacatgcttcgacgaattaaggaagatgaagatgataaaacagttttggatcttgctgtggttttgtttgaaacagcaacgcttcggtcagggtatcttttaccagacactaaagcatatggagatagaatagaaagaatgcttcgcctcagtttgaacattgaccctgatgcaaaggtggaagaagagcccgaagaagaacctgaagagacagcagaagacacaacagaagacacagagcaagacgaagatgaagaaatggatgtgggaacagatgaagaagaagaaacagcaaaggaatctacagctgaaaaagatgaattgtaaattatactctcaccatttggatcctgtgtggagagggaatgtgaaatttacatcatttctttttgggagagacttgttttggatgccccctaatccccttctcccctgcactgtaaaatgtgggattatgggtcacaggaaaaagtgggttttttagttgaattttttttaacattcctcatgaatgtaaatttgtactatttaactgactattcttgatgtaaaatcttgtcatgtgtataaaaataaaaaagatcccaaatactcaaaaaaaaaaaaaaaaaa

SEQ ID NO: 156 - DNA, 2445 bp, Homo sapiens
ataaaagcccaggggcaagcggtccggataacggctagcctgaggagctgctgcgacagtccactacctttttcgagagtgactcccgttgtcccaaggcttcccagagcgaacctgtgcggctgcaggcaccggcgcgtcgagtttccggcgtccggaaggaccgagctcttctcgcggatccagtgttccgtttccagcccccaatctcagagcggagccgacagagagcagggaaccggcatggccaaagccgcggcgatcggcatcgacctgggcaccacctactcctgcgtgggggtgttccaacacggcaaggtggagatcatcgccaacgaccagggcaaccgcaccacccccagctacgtggccttcacggacaccgagcggctcatcggggatgcggccaagaaccaggtggcgctgaacccgcagaacaccgtgtttgacgcgaagcggctgattggccgcaagttcggcgacccggtggtgcagtcggacatgaagcactggcctttccaggtgatcaacgacggagacaagcccaaggtgcaggtgagctacaagggggagaccaaggcattctaccccgaggagatctcgtccatggtgctgaccaagatgaaggagatcgccgaggcgtacctgggctacccggtgaccaacgcggtgatcaccgtgccggcctacttcaacgactcgcagcgccaggccaccaaggatgcgggtgtgatcgcggggctcaacgtgctgcggatcatcaacgagcccacggccgccgccatcgcctacggcctggacagaacgggcaagggggagcgcaacgtgctcatctttgacctgggcgggggcaccttcgacgtgtccatcctgacgatcgacgacggcatcttcgaggtgaaggccacggccggggacacccacctgggtggggaggactttgacaacaggctggtgaaccacttcgtggaggagttcaagagaaaacacaagaaggacatcagccagaacaagcgagccgtgaggcggctgcgcaccgcctgcgagagggccaagaggaccctgtcgtccagcacccaggccagcctggagatcgactccctgtttgagggcatcgacttctacacgtccatcaccagggcgaggttcgaggagctgtgctccgacctgttccgaagcaccctggagcccgtggagaaggctctgcgcgacgccaagctggacaaggcccagattcacgacctggtcctggtcgggggctccacccgcatccccaaggtgcagaagctgctgcaggacttcttcaacgggcgcgacctgaacaagagcatcaaccccgacgaggctgtggcctacggggcggcggtgcaggcggccatcctgatgggggacaagtccgagaacgtgcaggacctgctgctgctggacgtggctcccctgtcgctggggctggagacggccggaggcgtgatgactgccctgatcaagcgcaactccaccatccccaccaagcagacgcagatcttcaccacctactccgacaaccaacccggggtgctgatccaggtgtacgagggcgagagggccatgacgaaagacaacaatctgttggggcgcttcgagctgagcggcatccctccggcccccaggggcgtgccccagatcgaggtgaccttcgacatcgatgccaacggcatcctgaacgtcacggccacggacaagagcaccggcaaggccaacaagatcaccatcaccaacgacaagggccgcctgagcaaggaggagatcgagcgcatggtgcaggaggcggagaagtacaaagcggaggacgaggtgcagcgcgagagggtgtcagccaagaacgccctggagtcctacgccttcaacatgaagagcgccgtggaggatgaggggctcaagggcaagatcagcgaggcggacaagaagaaggtgctggacaagtgtcaagaggtcatctcgtggctggacgccaacaccttggccgagaaggacgagtttgagcacaagaggaaggagctggagcaggtgtgtaaccccatcatcagcggactgtaccagggtgccggtggtcccgggcctgggggcttcggggctcagggtcccaagggagggtctgggtcaggccccaccattgaggaggtagattaggggcctttccaagattgctgtttttgttttggagcttcaagactttgcatttcctagtatttctgtttgtcagttctcaatttcctgtgtttgcaatgttgaaattttttggtgaagtactgaacttgctttttttccggtttctacatgcagagatgaatttatactgccatcttacgactatttcttctttttaatacacttaactcaggccattttttaagttggttacttcaaagtaaataaactttaaaattcaaaaaaaaaaaaaaaaaa

SEQ ID NO: 157 - DNA, 2551 bp, Homo sapiens
ggaaaacggccagcctgaggagctgctgcgagggtccgcttcgtctttcgagagtgactcccgcggtcccaaggctttccagagcgaacctgtgcggctgcaggcaccggcgtgttgagtttccggcgttccgaaggactgagctcttgtcgcggatcccgtccgccgtttccagcccccagtctcagagcggagcccacagagcagggcaccggcatggccaaagccgcggcgatcggcatcgacctgggcaccacctactcctgcgtgggggtgttccaacacggcaaggtggagatcatcgccaacgaccagggcaaccgcaccacccccagctacgtggccttcacggacaccgagcggctcatcggggatgcggccaagaaccaggtggcgctgaacccgcagaacaccgtgtttgacgcgaagcggctgatcggccgcaagttcggcgacccggtggtgcagtcggacatgaagcactggcctttccaggtgatcaacgacggagacaagcccaaggtgcaggtgagctacaagggggagaccaaggcattctaccccgaggagatctcgtccatggtgctgaccaagatgaaggagatcgccgaggcgtacctgggctacccggtgaccaacgcggtgatcaccgtgccggcctacttcaacgactcgcagcgccaggccaccaaggatgcgggtgtgatcgcggggctcaacgtgctgcggatcatcaacgagcccacggccgccgccatcgcctacggcctggacagaacgggcaagggggagcgcaacgtgctcatctttgacctgggcgggggcaccttcgacgtgtccatcctgacgatcgacgacggcatcttcgaggtgaaggccacggccggggacacccacctgggtggggaggactttgacaacaggctggtgaaccacttcgtggaggagttcaagagaaaacacaagaaggacatcagccagaacaagcgagccgtgaggcggctgcgcaccgcctgcgagagggccaagaggaccctgtcgtccagcacccaggccagcctggagatcgactccctgtttgagggcatcgacttctacacgtccatcaccagggcgaggttcgaggagctgtgctccgacctgttccgaagcaccctggagcccgtggagaaggctctgcgcgacgccaagctggacaaggcccagattcacgacctggtcctggtcgggggctccacccgcatccccaaggtgcagaagctgctgcaggacttcttcaacgggcgcgacctgaacaagagcatcaaccccgacgaggctgtggcctacggggcggcggtgcaggcggccatcctgatgggggacaagtccgagaacgtgcaggacctgctgctgctggacgtggctcccctgtcgctggggctggagacggccggaggcgtgatgactgccctgatcaagcgcaactccaccatccccaccaagcagacgcagatcttcaccacctactccgacaaccaacccggggtgctgatccaggtgtacgagggcgagagggccatgacgaaagacaacaatctgttggggcgcttcgagctgagcggcatccctccggcccccaggggcgtgccccagatcgaggtgaccttcgacatcgatgccaacggcatcctgaacgtcacggccacggacaagagcaccggcaaggccaacaagatcaccatcaccaacgacaagggccgcctgagcaaggaggagatcgagcgcatggtgcaggaggcggagaagtacaaagcggaggacgaggtgcagcgcgagagggtgtcagccaagaacgccctggagtcctacgccttcaacatgaagagcgccgtggaggatgaggggctcaagggcaagatcagcgaggcggacaagaagaaggttctggacaagtgtcaagaggtcatctcgtggctggacgccaacaccttggccgagaaggacgagtttgagcacaagaggaaggagctggagcaggtgtgtaaccccatcatcagcggactgtaccagggtgccggtggtcccgggcctggcggcttcggggctcagggtcccaagggagggtctgggtcaggccctaccattgaggaggtggattaggggcctttgttctttagtatgtttgtctttgaggtggactgttgggactcaaggactttgctgctgttttcctatgtcatttctgcttcagctctttgctgcttcacttctttgtaaagttgtaacctgatggtaattagctggcttcattatttttgtagtacaaccgatatgttcattagaattctttgcatttaatgttgatactgtaagggtgtttcgttccctttaaatgaatcaacactgccaccttctgtacgagtttgtttgttttttttttttttttttttttttgcttggcgaaaacactacaaaggctgggaatgtatgtttttataatttgtttatttaaatatgaaaaataaaatgttaaactttaaaaaaaaaaaaaaaaaaaaaaaaaaaaaaa

SEQ ID NO: 158 - DNA, 3249 bp, Homo sapiens; identical to SEQ ID NO: 90

SEQ ID NO: 159 - DNA, 1240 bp, Homo sapiens
cacattgttctgatcatctgaagatcagctattagaagagaaagatcagttaagtcctttggacctgatcagcttgatacaagaactactgatttcaacttctttggcttaattctctcggaaacgatgaaatatacaagttatatcttggcttttcagctctgcatcgttttgggttctcttggctgttactgccaggacccatatgtaaaagaagcagaaaaccttaagaaatattttaatgcaggtcattcagatgtagcggataatggaactcttttcttaggcattttgaagaattggaaagaggagagtgacagaaaaataatgcagagccaaattgtctccttttacttcaaactttttaaaaactttaaagatgaccagagcatccaaaagagtgtggagaccatcaaggaagacatgaatgtcaagtttttcaatagcaacaaaaagaaacgagatgacttcgaaaagctgactaattattcggtaactgacttgaatgtccaacgcaaagcaatacatgaactcatccaagtgatggctgaactgtcgccagcagctaaaacagggaagcgaaaaaggagtcagatgctgtttcgaggtcgaagagcatcccagtaatggttgtcctgcctgcaatatttgaattttaaatctaaatctatttattaatatttaacattatttatatggggaatatatttttagactcatcaatcaaataagtatttataatagcaacttttgtgtaatgaaaatgaatatctattaatatatgtattatttataattcctatatcctgtgactgtctcacttaatcctttgttttctgactaattaggcaaggctatgtgattacaaggctttatctcaggggccaactaggcagccaacctaagcaagatcccatgggttgtgtgtttatttcacttgatgatacaatgaacacttataagtgaagtgatactatccagttactgccggtttgaaaatatgcctgcaatctgagccagtgctttaatggcatgtcagacagaacttgaatgtgtcaggtgaccctgatgaaaacatagcatctcaggagatttcatgcctggtgcttccaaatattgttgacaactgtgactgtacccaaatggaaagtaactcatttgttaaaattatcaatatctaatatatatgaataaagtgtaagttcacaacaaaaaaaaaaaaaaaaaaaaaaaaaaaaaa

SEQ ID NO: 160 - DNA, 1629 bp, Homo sapiens
acacatcaggggcttgctcttgcaaaaccaaaccacaagacagacttgcaaaagaaggcatgcacagctcagcactgctctgttgcctggtcctcctgactggggtgagggccagcccaggccagggcacccagtctgagaacagctgcacccacttcccaggcaacctgcctaacatgcttcgagatctccgagatgccttcagcagagtgaagactttctttcaaatgaaggatcagctggacaacttgttgttaaaggagtccttgctggaggactttaagggttacctgggttgccaagccttgtctgagatgatccagttttacctggaggaggtgatgccccaagctgagaaccaagacccagacatcaaggcgcatgtgaactccctgggggagaacctgaagaccctcaggctgaggctacggcgctgtcatcgatttcttccctgtgaaaacaagagcaaggccgtggagcaggtgaagaatgcctttaataagctccaagagaaaggcatctacaaagccatgagtgagtttgacatcttcatcaactacatagaagcctacatgacaatgaagatacgaaactgagacatcagggtggcgactctatagactctaggacataaattagaggtctccaaaatcggatctggggctctgggatagctgacccagccccttgagaaaccttattgtacctctcttatagaatatttattacctctgatacctcaacccccatttctatttatttactgagcttctctgtgaacgatttagaaagaagcccaatattataatttttttcaatatttattattttcacctgtttttaagctgtttccatagggtgacacactatggtatttgagtgttttaagataaattataagttacataagggaggaaaaaaaatgttctttggggagccaacagaagcttccattccaagcctgaccacgctttctagctgttgagctgttttccctgacctccctctaatttatcttgtctctgggcttggggcttcctaactgctacaaatactcttaggaagagaaaccagggagcccctttgatgattaattcaccttccagtgtctcggagggattcccctaacctcattccccaaccacttcattcttgaaagctgtggccagcttgttatttataacaacctaaatttggttctaggccgggcgcggtggctcacgcctgtaatcccagcactttgggaggctgaggcgggtggatcacttgaggtcaggagttcctaaccagcctggtcaacatggtgaaaccccgtctctactaaaaatacaaaaattagccgggcatggtggcgcgcacctgtaatcccagctacttgggaggctgaggcaagagaattgcttgaacccaggagatggaagttgcagtgagctgatatcatgcccctgtactccagcctgggtgacagagcaagactctgtctcaaaaaataaaaataaaaataaatttggttctaatagaactcagttttaactagaatttattcaattcctctgggaatgttacattgtttgtctgtcttcatagcagattttaattttgaataaataaatgtatcttattcacatc

SEQ ID NO: 161 - DNA, 1832 bp, Homo sapiens; identical to SEQ ID NO: 37

SEQ ID NO: 162 - DNA, 4107 bp, Homo sapiens
gcgcaaccctccggaagctgccgcccctttccccttttatgggaatactttttttaaaaaaaaagagttcgctggcgccaccccgtaggactggccgccctaaaaccgtgataaaggagctgctcgccacttctcacttccgcttccttccagtaaggagtcggggtcttccccagttttctcagccaggcggcggcggcgactggcaatgtttggcctcaaaagaaacgcggtaatcggactcaacctctactgtgggggggccggcttgggggccggcagcggcggcgccacccgcccgggagggcgacttttggctacggagaaggaggcctcggcccggcgagagatagggggaggggaggccggcgcggtgattggcggaagcgccggcgcaagccccccgtccaccctcacgccagactcccggagggtcgcgcggccgccgcccattggcgccgaggtccccgacgtcaccgcgacccccgcgaggctgcttttcttcgcgcccacccgccgcgcggcgccgcttgaggagatggaagccccggccgctgacgccatcatgtcgcccgaagaggagctggacgggtacgagccggagcctctcgggaagcggccggctgtcctgccgctgctggagttggtcggggaatctggtaataacaccagtacggacgggtcactaccctcgacgccgccgccagcagaggaggaggaggacgagttgtaccggcagtcgctggagattatctctcggtaccttcgggagcaggccaccggcgccaaggacacaaagccaatgggcaggtctggggccaccagcaggaaggcgctggagaccttacgacgggttggggatggcgtgcagcgcaaccacgagacggccttccaaggcatgcttcggaaactggacatcaaaaacgaagacgatgtgaaatcgttgtctcgagtgatgatccatgttttcagcgacggcgtaacaaactggggcaggattgtgactctcatttcttttggtgcctttgtggctaaacacttgaagaccataaaccaagaaagctgcatcgaaccattagcagaaagtatcacagacgttctcgtaaggacaaaacgggactggctagttaaacaaagaggctgggatgggtttgtggagttcttccatgtagaggacctagaaggtggcatcaggaatgtgctgctggcttttgcaggtgttgctggagtaggagctggtttggcatatctaataagatagccttactgtaagtgcaatagttgacttttaaccaaccaccaccaccaccaaaaccagtttatgcagttggactccaagctgtaacttcctagagttgcaccctagcaacctagccagaaaagcaagtggcaagaggattatggctaacaagaataaatacatgggaagagtgctccccattgattgaagagtcactgtctgaaagaagcaaagttcagtttcagcaacaaacaaactttgtttgggaagctatggaggaggacttttagatttagtgaagatggtagggtggaaagacttaatttccttgttgagaacaggaaagtggccagtagccaggcaagtcatagaattgattacccgccgaattcattaatttactgtagtgttaagagaagcactaagaatgccagtgacctgtgtaaaagttacaagtaatagaactatgactgtaagcctcagtactgtacaagggaagcttttcctctctctaattagctttcccagtatacttcttagaaagtccaagtgttcaggacttttatacctgttatactttggcttggtttccatgattcttactttattagcctagtttatcaccaataatacttgacggaaggctcagtaattagttatgaatatggatatcctcaattcttaagacagcttgtaaatgtatttgtaaaaattgtatatatttttacagaaagtctatttctttgaaacgaaggaagtatcgaatttacattagtttttttcatacccttttgaactttgcaacttccgtaattaggaacctgtttcttacagcttttctatgctaaactttgttctgttcagttctagagtgtatacagaacgaattgatgtgtaactgtatgcagactggttgtagtggaacaaatctgataactatgcaggtttaaattttcttatctgattttggtaagtattccttagataggtttttctttgaaaacctgggattgagaggttgatgaatggaaattctttcacttcattatatgcaagttttcaataattaggtctaagtggagttttaaggttactgatgacttacaaataatgggctctgattgggcaatactcatttgagttccttccatttgacctaatttaactggtgaaatttaaagtgaattcatgggctcatctttaaagcttttactaaaagattttcagctgaatggaactcattagctgtgtgcatataaaaagatcacatcaggtggatggagagacatttgatcccttgtttgcttaataaattataaaatgatggcttggaaaagcaggctagtctaaccatggtgctattattaggcttgcttgttacacacacaggtctaagcctagtatgtcaataaagcaaatacttactgttttgtttctattaatgattcccaaaccttgttgcaagtttttgcattggcatctttggatttcagtcttgatgtttgttctatcagacttaaccttttatttcctgtccttccttgaaattgctgattgttctgctccctctacagatatttatatcaattcctacagctttcccctgccatccctgaactctttctagcccttttagattttggcactgtgaaacccctgctggaaacctgagtgaccctccctccccaccaagagtccacagacctttcatctttcacgaacttgatcctgttagcaggtggtaataccatgggtgctgtgacactaacagtcattgagaggtgggaggaagtcccttttccttggactggtatcttttcaactattgttttatcctgtctttgggggcaatgtgtcaaaagtcccctcaggaattttcagaggaaagaacattttatgaggctttctctaaagtttcctttgtataggagtatgctcacttaaatttacagaaagaggtgagctgtgttaaacctcagagtttaaaagctactgataaactgaagaaagtgtctatattggaactagggtcatttgaaagcttcagtctcggaacatgacctttagtctgtggactccatttaaaaataggtatgaataagatgactaagaatgtaatggggaagaactgccctgcctgcccatctcagagccataaggtcatctttgctagagctatttttacctatgtatttatcgttcttgatcataagccgcttatttatatcatgtatctctaaggacctaaaagcactttatgtagtttttaattaatcttaagatctggttacggtaactaaaaaagcctgtctgccaaatccagtggaaacaagtgcatagatgtgaattggtttttaggggccccacttcccaattcattaggtatgactgtggaaatacagacaaggatcttagttgatattttgggcttggggcagtgagggcttaggacaccccaagtggtttgggaaaggaggaggggagtggtgggtttatagggggaggaggaggcaggtggtctaagtgctgactggctacgtagttcgggcaaatcctccaaaagggaaagggaggatttgcttagaaggatggcgctcccagtgactactttttgacttctgtttgtcttacgcttctctcagggaaaaacatgcagtcctctagtgtttcatgtacattctgtggggggtgaacaccttggttctggttaaacagctgtacttttgatagctgtgccaggaagggttaggaccaactacaaattaatgttggttgtcaaatgtagtgtgtttccctaactttctgtttttcctgagaaaaaaaaataaatcttttattcaaatacagggaaaaaaaaaaaaaaaaaa

SEQ ID NO: 163 - DNA, 2081 bp, Homo sapiens; identical to SEQ ID NO: 128

SEQ ID NO: 164 - DNA, 1906 bp, Homo sapiens; identical to SEQ ID NO: 129

SEQ ID NO: 165 - DNA, 2387 bp, Homo sapiens; identical to SEQ ID NO: 42

SEQ ID NO: 166 - DNA, 1220 bp, Homo sapiens
cgctccacctctcaagcagccagcgcctgcctgaatctgttctgccccctccccacccatttcaccaccaccatgacaccgggcacccagtctcctttcttcctgctgctgctcctcacagtgcttacagttgttacgggttctggtcatgcaagctctaccccaggtggagaaaaggagacttcggctacccagagaagttcagtgcccagctctactgagaagaatgctttgtctactggggtctctttctttttcctgtcttttcacatttcaaacctccagtttaattcctctctggaagatcccagcaccgactactaccaagagctgcagagagacatttctgaaatgtttttgcagatttataaacaagggggttttctgggcctctccaatattaagttcaggccaggatctgtggtggtacaattgactctggccttccgagaaggtaccatcaatgtccacgacgtggagacacagttcaatcagtataaaacggaagcagcctctcgatataacctgacgatctcagacgtcagcgtgagtgatgtgccatttcctttctctgcccagtctggggctggggtgccaggctggggcatcgcgctgctggtgctggtctgtgttctggttgcgctggccattgtctatctcattgccttggctgtctgtcagtgccgccgaaagaactacgggcagctggacatctttccagcccgggatacctaccatcctatgagcgagtaccccacctaccacacccatgggcgctatgtgccccctagcagtaccgatcgtagcccctatgagaaggtttctgcaggtaatggtggcagcagcctctcttacacaaacccagcagtggcagccacttctgccaacttgtaggggcacgtcgcccgctgagctgagtggccagccagtgccattccactccactcaggttcttcagggccagagcccctgcaccctgtttgggctggtgagctgggagttcaggtgggctgctcacagcctccttcagaggccccaccaatttctcggacacttctcagtgtgtggaagctcatgtgggcccctgagggctcatgcctgggaagtgttgtggtgggggctcccaggaggactggcccagagagccctgagatagcggggatcctgaactggactgaataaaacgtggtctcccactgcgccaaaaaaaaaaaaaaaaa

SEQ ID NO: 167 - DNA, 4518 bp, Homo sapiens
ggagtttattcataacgcgctctccaagtatacgtggcaatgcgttgctgggttattttaatcattctaggcatcgttttcctccttatgcctctatcattcctccctatctacactaacatcccacgctctgaacgcgcgcccattaatacccttctttcctccactctccctgggactcttgatcaaagcgcggccctttccccagccttagcgaggcgccctgcagcctggtacgcgcgtggcgtggcggtgggcgcgcagtgcgttctcggtgtggagggcagctgttccgcctgcgatgatttatactcacaggacaaggatgcggtttgtcaaacagtactgctacggaggagcagcagagaaagggagagggtttgagagggagcaaaagaaaatggtaggcgcgcgtagttaattcatgcggctctcttactctgtttacatcctagagctagagtgctcggctgcccggctgagtctcctccccaccttccccaccctccccaccctccccataagcgcccctcccgggttcccaaagcagagggcgtgggggaaaagaaaaaagatcctctctcgctaatctccgcccaccggccctttataatgcgagggtctggacggctgaggacccccgagctgtgctgctcgcggccgccaccgccgggccccggccgtccctggctcccctcctgcctcgagaagggcagggcttctcagaggcttggcgggaaaaagaacggagggagggatcgcgctgagtataaaagccggttttcggggctttatctaactcgctgtagtaattccagcgagaggcagagggagcgagcgggcggccggctagggtggaagagccgggcgagcagagctgcgctgcgggcgtcctgggaagggagatccggagcgaatagggggcttcgcctctggcccagccctcccgctgatcccccagccagcggtccgcaacccttgccgcatccacgaaactttgcccatagcagcgggcgggcactttgcactggaacttacaacacccgagcaaggacgcgactctcccgacgcggggaggctattctgcccatttggggacacttccccgccgctgccaggacccgcttctctgaaaggctctccttgcagctgcttagacgctggatttttttcgggtagtggaaaaccagcagcctcccgcgacgatgcccctcaacgttagcttcaccaacaggaactatgacctcgactacgactcggtgcagccgtatttctactgcgacgaggaggagaacttctaccagcagcagcagcagagcgagctgcagcccccggcgcccagcgaggatatctggaagaaattcgagctgctgcccaccccgcccctgtcccctagccgccgctccgggctctgctcgccctcctacgttgcggtcacacccttctcccttcggggagacaacgacggcggtggcgggagcttctccacggccgaccagctggagatggtgaccgagctgctgggaggagacatggtgaaccagagtttcatctgcgacccggacgacgagaccttcatcaaaaacatcatcatccaggactgtatgtggagcggcttctcggccgccgccaagctcgtctcagagaagctggcctcctaccaggctgcgcgcaaagacagcggcagcccgaaccccgcccgcggccacagcgtctgctccacctccagcttgtacctgcaggatctgagcgccgccgcctcagagtgcatcgacccctcggtggtcttcccctaccctctcaacgacagcagctcgcccaagtcctgcgcctcgcaagactccagcgccttctctccgtcctcggattctctgctctcctcgacggagtcctccccgcagggcagccccgagcccctggtgctccatgaggagacaccgcccaccaccagcagcgactctgaggaggaacaagaagatgaggaagaaatcgatgttgtttctgtggaaaagaggcaggctcctggcaaaaggtcagagtctggatcaccttctgctggaggccacagcaaacctcctcacagcccactggtcctcaagaggtgccacgtctccacacatcagcacaactacgcagcgcctccctccactcggaaggactatcctgctgccaagagggtcaagttggacagtgtcagagtcctgagacagatcagcaacaaccgaaaatgcaccagccccaggtcctcggacaccgaggagaatgtcaagaggcgaacacacaacgtcttggagcgccagaggaggaacgagctaaaacggagcttttttgccctgcgtgaccagatcccggagttggaaaacaatgaaaaggcccccaaggtagttatccttaaaaaagccacagcatacatcctgtccgtccaagcagaggagcaaaagctcatttctgaagaggacttgttgcggaaacgacgagaacagttgaaacacaaacttgaacagctacggaactcttgtgcgtaaggaaaagtaaggaaaacgattccttctaacagaaatgtcctgagcaatcacctatgaacttgtttcaaatgcatgatcaaatgcaacctcacaaccttggctgagtcttgagactgaaagatttagccataatgtaaactgcctcaaattggactttgggcataaaagaacttttttatgcttaccatcttttttttttctttaacagatttgtatttaagaattgtttttaaaaaattttaagatttacacaatgtttctctgtaaatattgccattaaatgtaaataactttaataaaacgtttatagcagttacacagaatttcaatcctagtatatagtacctagtattataggtactataaaccctaattttttttatttaagtacattttgctttttaaagttgatttttttctattgtttttagaaaaaataaaataactggcaaatatatcattgagccaaatcttaagttgtgaatgttttgtttcgtttcttccccctcccaaccaccaccatccctgtttgttttcatcaattgccccttcagagggtggtcttaagaaaggcaagagttttcctctgttgaaatgggtctgggggccttaaggtctttaagttcttggaggttctaagatgcttcctggagactatgataacagccagagttgacagttagaaggaatggcagaaggcaggtgagaaggtgagaggtaggcaaaggagatacaagaggtcaaaggtagcagttaagtacacaaagaggcataaggactggggagttgggaggaaggtgaggaagaaactcctgttactttagttaaccagtgccagtcccctgctcactccaaacccaggaattctgcccagttgatggggacacggtgggaaccagcttctgctgccttcacaaccaggcgccagtcctgtccatgggttatctcgcaaaccccagaggatctctgggaggaatgctactattaaccctatttcacaaacaaggaaatagaagagctcaaagaggttatgtaacttatctgtagccacgcagataatacaaagcagcaatctggacccattctgttcaaaacacttaacccttcgctatcatgccttggttcatctgggtctaatgtgctgagatcaagaaggtttaggacctaatggacagactcaagtcataacaatgctaagctctatttgtgtcccaagcactcctaagcattttatccctaactctacatcaaccccatgaaggagatactgttgatttccccatattagaagtagagagggaagctgaggcacacaaagactcatccacatgcccaagattcactgatagggaaaagtggaagcgagatttgaacccaggctgtttactcctaacctgtccaagccacctctcagacgacggtaggaatcagctggctgcttgtgagtacaggagttacagtccagtgggttatgttttttaagtctcaacatctaagcctggtcaggcatcagttcccctttttttgtgatttattttgtttttattttgttgttcattgtttaatttttccttttacaatgagaaggtcaccatcttgactcctaccttagccatttgttgaatcagactcatgacggctcctgggaagaagccagttcagatcataaaataaaacatatttattctttgtcatgggagtcattattttagaaactacaaactctccttgcttccatccttttttacatactcatgacacatgctcatcctgagtccttgaaaaggtatttttgaacatgtgtattaattataagcctctgaaaacctatggcccaaaccagaaatgatgttgattatataggtaaatgaaggatgctattgctgttctaattacctcattgtctcagtctcaaagtaggtcttcagctccctgtactttgggattttaatctaccaccacccataaatcaataaataattactttctttga

SEQ ID NO: 168 - DNA, 4206 bp, Homo sapiens; identical to SEQ ID NO: 105

SEQ ID NO: 169 - DNA, 13905 bp, Homo sapiens
gggaggggggaggggagccagagcgagggagggtttatcgaccgggcgattttggttaaaatattcaaaatggcggacggaggagcagcgagtcaagatgagagttcagccgcggcggcagcagcagcagactcaagaatgaacaatccgtcagaaaccagtaaaccatctatggagagtggagatggcaacacaggcacacaaaccaatggtctggactttcagaagcagcctgtgcctgtaggaggagcaatctcaacagcccaggcgcaggctttccttggacatctccatcaggtccaactcgctggaacaagtttacaggctgctgctcagtctttaaatgtacagtctaaatctaatgaagaatcgggggattcgcagcagccaagccagccttcccagcagccttcagtgcaggcagccattccccagacccagcttatgctagctggaggacagataactgggcttactttgacgcctgcccagcaacagttactactccagcaggcacaggcacaggcacagctgctggctgctgcagtgcagcagcactccgccagccagcagcacagtgctgctggagccaccatctccgcctctgctgccacgcccatgacgcagatccccctgtctcagcccatacagatcgcacaggatcttcaacaactgcaacagcttcaacagcagaatctcaacctgcaacagtttgtgttggtgcatccaaccaccaatttgcagccagcgcagtttatcatctcacagacgccccagggccagcagggtctcctgcaagcgcaaaatcttctaacgcaactacctcagcaaagccaagccaacctcctacagtcgcagccaagcatcaccctcacctcccagccagcaaccccaacacgcacaatagcagcaaccccaattcagacacttccacagagccagtcaacaccaaagcgaattgatactcccagcttggaggagcccagtgaccttgaggagcttgagcagtttgccaagaccttcaaacaaagacgaatcaaacttggattcactcagggtgatgttgggctcgctatggggaaactatatggaaatgacttcagccaaactaccatctctcgatttgaagccttgaacctcagctttaagaacatgtgcaagttgaagccacttttagagaagtggctaaatgatgcagagaacctctcatctgattcgtccctctccagcccaagtgccctgaattctccaggaattgagggcttgagccgtaggaggaagaaacgcaccagcatagagaccaacatccgtgtggccttagagaagagtttcttggagaatcaaaagcctacctcggaagagatcactatgattgctgatcagctcaatatggaaaaagaggtgattcgtgtttggttctgtaaccgccgccagaaagaaaaaagaatcaacccaccaagcagtggtgggaccagcagctcacctattaaagcaattttccccagcccaacttcactggtggcgaccacaccaagccttgtgactagcagtgcagcaactaccctcacagtcagccctgtcctccctctgaccagtgctgctgtgacgaatctttcagttacaggcacttcagacaccacctccaacaacacagcaaccgtgatttccacagcgcctccagcttcctcagcagtcacgtccccctctctgagtccctccccttctgcctcagcctccacctccgaggcatccagtgccagtgagaccagcacaacacagaccacctccactcctttgtcctcccctcttgggaccagccaggtgatggtgacagcatcaggtttgcaaacagcagcagctgctgcccttcaaggagctgcacagttgccagcaaatgccagtcttgctgccatggcagctgctgcaggactaaacccaagcctgatggcaccctcacagtttgcggctggaggtgccttactcagtctgaatccagggaccctgagcggtgctctcagcccagctctaatgagcaacagtacactggcaactattcaagctcttgcttctggtggctctcttccaataacatcacttgatgcaactgggaacctggtatttgccaatgcgggaggagcccccaacatcgtgactgcccctctgttcctgaaccctcagaacctctctctgctcaccagcaaccctgttagcttggtctctgccgccgcagcatctgcagggaactctgcacctgtagccagccttcacgccacctccacctctgctgagtccatccagaactctctcttcacagtggcctctgccagcggggctgcgtccaccaccaccaccgcctccaaggcacagtgagctgggcagagctgggctgccagaagcctttttcactctgcagtgtgattggactgccagccaggttaataaactgaaaaatgtgattggcttcctctcgccgtgttgtgagggcaaaggagagaagggagaaaaaaaaaaaaaaaccacacacacccatacacacataccagaaaaagaaagaaaggatggagacggaacatttgcctaattttgtaataaaacactgtcttttcaggattgcttcatggattggagaactttctaaccaaaaattaaaaaaaaaaaaaaaaaaagaaacaaaaaaatcaaaaacaaacaaaaataagtgaaaggactacttatcatttccagcagtcatgatgacaagttaaggtgggttaccaattccaatataggaaggggatttcttgtttgtctaaatttctttttttcttaaaaaaaaaaaatcatttttatgggtctgttgtacaggccattaagtcataacaaggtgtttataatcgtatcaattgtgttgggggttcctttcttaactggtacaatttaggcaggcctgtattactgtattattattgttgttgttgttattgttttatatatatagtttggacatgtttattatctcttgctcctggatcctatttcagtgagctcccacactgtggggagggagggttttggggtaaggggagacttctgttcttaactgtggggaatgttcttgctggtttccttatccttgatgactcttacagaggtgctagaaaattattttcttttgccacttatgcaagaggcttggtgcagaagctgaaggcagtgtgtgcaaacactcccattccacacacgccccttcccctccccacatcaggtggtgcctttggagcacttttgtgtaggaaggaattcctgctgaactgtagctctcactcacccccaaatcattgaatgaccctgaggcccagttcctgtggtgcaacagtgctgctttctgctactttcaatgggaacagctgtacatgttgcagggcaggatttggttcccaagagcaaagactactgcagacacctgacttggtggttctcctgatttcttatctcctgaaaaatgctcctgctgttggtgtgtttgtttgtttgttccattttgtggaagtttttcatccaaactttaactaacttggcaaagaaaaaaaactgacttactgaaattgggaaacttttcccttcttttattttctaaaggaattctactagactattttccattgataatatatacaaaagaggtgtgatgagaagggtataaggttaccaccttttcctctagagagccacagacttcctttccactggatggtttataaattcctctaaccctgagattcttcttggttctctgactaaaggaggcacttattagccgggctgggatctgtagaacctttgaagaaggactttgagcaggaactttgcacacaccttaagtgtctccttggtttgttcatgatgctcctgctaggtaggtctaaatggcaatacacatctctttattcaatgtagaaagtaattagctctgtaattattttcagggtgtttgtagactatataaatgagcccattgaaaaggaagagtttgtgaaagtggatgaagaggaataagggtaacttggagattaaattcctttttttgtcagtgtactgttgttatgccatctgtaccaaaaaattttccaaaagactggatcactgcagtgcagctcatctaagttccccttcttattggagttaaaggttcccatttggtggctgtgggtgcttgcttaaatctctggtggtcccaagactgcactttttctccctttcgagctggggatgtagagagaacttacaggtgatttttattctgattgcttttgtttgtgtccacaagggagcttggattctgtgtacttgtctctttcccattgtccagtaaggcagtaaatacagacacaatgtgtacttttgtgtgtgattcaagtgggagacagtctgttaaaaggtcagaaacattttagtcccctttaaaatatttcttttagtttatttctatcgtgttttatttcacagatatttaattaccacccctaaatttcctcctcttacccttcaccttccctaaaatccttccaaaatcagtgaactgcaagcagggaaactaacaaatgtccattcaccctttttgtgtggtgtgtttttttatgttttgttttgttttttaactaagcttgaaccaaagtcaatttttagcaagctgctgtactaatggactagttgataacgtgcagttcagacacatcgaggagatagatgctactgacaatttctttttcatttgtctttattaattttatatgaaagttgctgcttgtttttaatcttttatgttggtaaattgtgatatcctctgggcagacattaacttgatgtttaactagtttattaggttggtgtgtaaatagaatgacaatgtcaattactaatttctctcctctccattcactttttctctgttgtagttaaatttaatcttctatcctgacttgacatctctacctttagtctgtggaaatgattttagggctatcagtaatgctgtagctgcccataataatgagtccctcccttgggagtggtgaaacttagaaggaaggattcagggagggaaatgctggtacccagtatactggattagaagttatagcattaatttctcaaaattgctaccaaaggaagtgtggagtcccaagggactcaagctcagtgaggtaagacaaagggcaaggaaaggctgtttgggtggtttttttttccccacatatggtttagaaaatgatccctttcccaaacaaaactcaccaacagactttaatattagaaaagatactaagctttaaatgtcaatacagtggtcttttattccctgccctgtctatattttctactcaatttgggataaggggattttatgtgaagcacttgatgagggtagaccagcataaaaaatctgtttaaaagaagaaataatctttaggaaaagataaatctttagataaaaataaatttttttctctttttttacttatttaaaaataagttgtgaaatgaaaggtacatttacacatgtacacacgaaacactaatatagctttttggtggttgtttagtttaaaatcaactccctatccatcatccctagatattctacttatcgtattgcttcatgaacaccttagtcattttttactttacgtatatatttttttatcatctcaagaaatgcattttgaattgaatgaactatcttctaagctaagatactcaaatttaacttttagccaccttatatgggagagcctggaaactaaaggggaccagggaccatttgaccaaaagaggtgtttggtggagtttctgcatttcaaagaagaaaggccagataggtcatcacaattcattgtattattctttttttttccccttaatgtttatgcaaattttattttatatttctgaatttggttagcacatactaagccaaagactattctaaatgcatttatagtgaatactatgtatgcccatggtaatgggtcctccctaaggagtggtgaatgtaattgtgtgaatcctgcttatcacaagtggtgcaatttggtcataaactttatttataccctgtatacatctgaataacagagcagaaagacctaaaaaagggcttctcacaggaacaatattactatgttgttctaagaaaaaataagttgagtgctgtattagtttaagtgtttctaaagttctataggcagcattttagaattaagaattgtgtatatccattaactgatataattcacatgtccttttatttgttatcagaaagatcaatactatcccaatttattcaacttgttacccaagaaatggaaccaaaggaatccaactttcattttgtgtagaatcatacctacttatacttaatgctagcactgtaagaaataagtcttttttgtttaaaaaagggaagataagattaaagattcttagtgagatcatcttgccaatttgttgtacatctctcattcattgttgggggaaaaaaaagcacaactatacctctttaatgttattttcttccattatccctcatttatttggaaagataagggaaaccttgtctgtattatccagaagcacagatatttgcttgacacaatatttaaattcagcccaatctttaacattaaaaaattttctttttaacttgctggaaaagttggatacattggcaaatatagggaattcatgtcttttttttttttttttttctggtcttgctctgttgcctaggctagagtgcaacggcatgatctcggctcactgcaacctctgcctcccgggttcaagcaattctcctgcttcagcctcccaagtagctgggattacaggcgcccaccaccgcacccggctaatttttgtatttttagtagggacgggatttctccgtgttggccaggctttttgaactcctgaccttaggtgatctgcctgccttggcctcccaaagtgctgggattacaggtatgagccactgtgcccatcctcatgtcaatttttaaagtgataaatcctgatattatacattgcaattagtgtagaataaacgcttggcttatagaactctctgttcttagtctaaagctgttcccaaaccaggtcatcctcacgaaacattcttgaccaagaaaaaagataaggtcattgagataggaagacagaggaaaagcctcttgctgttgtttcttcccaagaaaggagaagccctgccagggagaagtcagtagtattgctgactcactgtatcactgagtgtagggtgtggtagcaaggaggaggcaggggattcacgctgacaggtggctctggcctggctcttggggggccttctgaagaccagtctgcagtttgaggaagggccccaacaattcatttggagagcttggccaaatactttctcattaaatcagcacctaaacttgatgaacttaaagtttgtttattagagttgaaaacattaaaagatgactgatactaatgggagaaaaatactaaagacccaaaatttaaaattttccaaaatggacaagaattgatgggttaatttgctcataactgatatgagtttgcttttatgtgtgtgtggaaagcatttaatgtgtgatgctgttcatagtcctggctatttgatgtcattttcagttttacaacattttgaggatgacactttataaaatggtaaatctttctcagcgtttacaaacttggcttttgagaagggaaaaatcctctttgctatttctgtaagaagaataactgagatcagctattatataggtttgcatggatggtgtccacaatacaaatgtaaacttggacaggaataggataaataaattgctttcatcataaaggccaatcatccatttcttagtccaaggagattaaatataaataggacacccctgagatttccagtaaggtatttgaaaggattccactgggagggcagggaatatattttttctcagagcatccagtttgtacccagttttctatatggtttgtgaactgtagcttttaaaaaaaaattttgtagttttcttctaaccttattcattaagtagttccttgttttggcccttctactcttggccttagctaaaagcagtaaatgtgagtgaattttatgttgattatgtcacctggatctcctttccttcccttctttttctcattgaatggtggtaccttaatttgggtaacagctagcttctggcaccttcataaaatacctcagaatagcttagcattgttgcaaaactggttttaaactaaaaaccaaataaataagtgaaaaaattttataaatagtggaaataattctagctgtagcatttagttgaactaatgtttattatgatcgataaacaagattgatgctgtatgtatttgggatcctgtttataggttacaatttatagggttagggagggttgggtgggggaagaggagatgttgattatgttagaaggaaaacattgctcgtgtgtgtgtttgttttttcttatatctgtcttgccaaaggaaacttgattttccctgtgattggctttggcctctgtggtctggtctgcagcagtgtgtggtggcatgcaggtaacatatggggtgtccagtaggttcagggaccctgagggtgcatttacatcccttcctatggttgcccatgccccccagaccctgccaacctctcctaatgattcattacctctgtacatagcaaaagcataggcaaaggatgaatgcgtgaatgcctggatgtgcagttgagaaacagaggcagacatagacatgcaccaattaatttggagccaagaggtgagtgattgatgtatcttaaatctaggaaagttaaagtgaaacaggttctttgtgttgccctctgtcaagttactgaatgttgtgctaataacacaacactttaaaaccttacttacttttctcataccaaggctagttctttctagaccaaaaacacaaacaggataaaaagcaaaccaagaagttgaaagctaacctgcccacctcacccctgtgatacaaagtgtgaaccttaaggattagttggtgggattgaggagagaattattcttggtgggaacatgaatgagaaatgatgctggcttaggaaaaatcacaagccctttctgcccatactctgggacaaactttcttggctccctgagttcggatatagactgtatctctagaaaggctatttttttaaataaatgatcccacagaacttaagtgggatttggtttagataccaaagacactgctaatgtcattgcttatccttaagttttcaaaacaggcagagggaataggagcaaaaagccaaaatttggaaaagctttactttatctctttccttcccttttccccttttcccagtcccctgctttttgaaggaagtcttcttggttatcctggctttggaaaagagatttattttgttttgctctgctggctctttaaagatggatagttgctcaatctagcagtgatgttcttggaattgctgagaaatttggggagggcaaaagataggggtagaattttttcattatttccctttatctaatacttttaaatagaaccaacacagcctatatgagttcagacaatatttagatgtggtatctccatctgtctcctgtaaaagataagaattttcaagaacaggattacgtggaaaaccaaaagatcttcccttactctcctataaatgttttgttccaaatgtttttatatatgggctctagggagtcaggtagttcattgtttcggtgtactattgataggacacagaaagggagagagggtaaagaaatgtatcactctctgaatattgcatcaaaaatgattaggttgcagaacttcatgaaagctttactaataatcttattgttctgacattatgtaaaggtggtattaatattgtatgacttgtcaaagtgctagataggtttataagtaggtaatagggatgttgaagattagagcacttgaaacagaagttctgggaaaacaaggtgtgtgtaatggaacaccactttgagcacagaaacaaaggtcccttggacctggtagggaagatgtgatttatgattgtttctgtgtccctgtatctgcccaccctgcacagggctccaccacccagggccaccttctggtttaaacccaggacactgtcaaaaagttaagaccccaaaactaatttactgtaaaaaacattgaggactgctgcaaagttttcccttgttttctttgtgtacttgttcatcattgtataagttagccacagcttcacaagagcagcttaaggcttctttcataaattggcagtggcattgagttctcaaacattatatcccaaagtctgcaggcagacagctggatacagcgctgtgtataaatgagacgtccaaacacttgagtttcttaagattgggatctctttcaaatgaaaaaggacagagccaagtagagaaaagactttgtgctcccacccagccttaatgagtctcatggtctaaaagtataggaagaaatgaaatgcactttcagaagctaaaatgacagtgtctgctacaaaaggctgtagttgtaggcagtcggggatgccatgtccttggttccattcctgcgtgagtctgcagaaggcacacactttgtaagagtagagtggactagtgccagcctgaataggtttaaaactgcaaacagttggagaacatggaacaggttggtgcaggaagcctaagattttgcaatcatattataacattggcttttgacaacataaatgttgtatcttccctaaggtcaggtcggggaaagaaagacttccagcttcttacctctgcgtgcatgggcacgtgtgcattgctcagtccgcaggaggtctcactccgcaggaaacgctctcctcccgcataagtctgtacttccatcccctcatctgtggtagtagtgaaggctaggtgagtaagcgtgggctgttctacccaccagaagtccaggagctgttgtatacctcatttctaactcgtgaccgagtgacttgctttaactttctcgaaatcctacagagttgccaagtctgccctccctcctcagtcatgttaaactctggcctatagcatcatgggacctgtagcctagggtgggaccccctaaagcctctgaatgtcgctgcttaaaagctactgcaaactgagggcaaattgcaatcttctattcctttttgttgcaaggggtcttcacaggtctcttaacatctgctttccctgccaccctgcctttaggggctggccagctatccacacccctaacccaccctgtgtttctgacagctggccacacgtcaacttctgtacttgccttttccttggtggggtagaggccaaccccttctcctctgaggcctcagggttctgtttcttttcaggactttgggtagaagggaagacaccaaaggctcctttaagctgactgctgcatacacatttcactttttttcctttgacatgaccaaaaatatccaaatatttaagtttattattattattattattatttgacaatcttatatccaatgggctctctagaagctgcatccccagccctttcaccttttctttgaatgtagttcccaaccttcaattcccacccctaatgctgacaaaaagcttagccaggtcatgatactgctgctataagccaggggagggtggtttctttgttttgttttgttttgttttgtttttcaaatttccagccaaaaccaaagatttcttaatgattgtataaactcaaaacaaacaaaagaaccaaagaaaagggaagtcttcagcatcagtccagtctgtggtgtcctggcacttagaagagtgaggccagggaaggtggggcggggggaccctctgactggatcagaaagggcaggcaagctgcttaccaccttccagggtccagcacaggtgcatgcccctagctttggccctcacaaacttgtgagcatgccctgaaacaaattggcatttcagattttccaaaacaaaagtcaaaaaaccccatcaccaccatcatccaccctacaccaaccagggtcactatggggacttagcacagggcctagggagggtgggagctgctgctggactggcccgaggactccacagagtgggggacgttgaagacactggcgcacgattggctgctctgctgggtgctttaacctctggggctgggcgaatgcacgccacggtgcccttctgagcctttttttcttttcctgtactggaactgcttggaagtggctgtcctgtttgtgagaaaacatgcagaaagattatcaagcttttcatttctctttattgtagttttctttcctttttgcagcaccactgtgcaactatgcattgtacttcacaaccttttgtgctaggtagatgcctgtgactttttaacttggggggtggggggattgcaaatgaaggaactttttacatggatctttttaatctcagttggttgggggaggggggtacttggttcttgggtcacacaagctctatcccaaagcaaaatccaaatgttaataatattagcctgatgcagataccaaagataatttctttcctgcagaaccttagactcgtgtattaagtacgattacccagcacttgcattagtctaacctcagtaattccaaagcttagatgtatattttggtatatttctgggatattaaaaaaaaaatgtcgtttaacttcttgtttgtttcagtgtaatgctcttaaagtcatagcatgaaaataattgaactgtcctattcttagtagtttgaaataatagtatttttgtatgttttgggtgtgtctatgtatgtattaacataacagttttcactgcctaggtgttcataataaaaaagaaaatgaaaaaagttctgagtgtacataatattcaataataatctcccaccaggtgtcaatttagattgcatattcctcattactgttcccaactgggattttgttttcttttaaagagacagtgatcgtgtttttctaaagatgttttctttctctctttcaatatcttaactcactttttttttcttccttttttgtcttaattattaattcaggggtgtttgtccactgttgtcaaaggaggggcacaaggggaattggcccccggcctcctagaactttttgttttatgtactttaaaatgtgagtttgagttcttctttgtggaaacttaagatgtggtgtaaatgattctttccaaaattgtccagcagcttgaatgaggcagtgacaattctgaggtggtttattgggagtccttctacatttctcttagataactctgcactctgggtggctattgtgtagccttactgccccagagtgcctgttagccaaatatttcccctctgataggaatattttctaagaatcagctgataacttgcgtgctggaccttgttatctgtgcccctgggagacacacgttttcttggttttgaaaacctgaaacacaggcaactttacattttggggaattagctgatgcctcctgaagcctgaggaggtggcggggaatatgagcggtgctgtctctctcaaaagtgccctttagatgattccccctcctagggctgcctgcaggggctgtaggcttgggaaagattgtgtaggtgacagtgaatcagaatgaagtggtagattttgtgtagatgcatttgtctgctgtaattttttatatatatattaaacttactgtaactgtacagttcatttctgttgtaaaacatcattaaaccatcttccaagtgttttcacattg

SEQ ID NO: 170 - DNA, 4507 bp, Homo sapiens; identical to SEQ ID NO: 51

SEQ ID NO: 171 - DNA, 579 bp, Homo sapiens
aggctcagtataaatagcagccaccgctccctggcaggcagggacccgcagctcagctacagcacagatcagcaccatgaagcttctcacgggcctggttttctgctccttggtcctgggtgtcagcagccgaagcttcttttcgttccttggcgaggcttttgatggggctcgggacatgtggagagcctactctgacatgagagaagccaattacatcggctcagacaaatacttccatgctcgggggaactatgatgctgccaaaaggggacctgggggtgcctgggctgcagaagtgatcagcgatgccagagagaatatccagagattctttggccatggtgcggaggactcgctggctgatcaggctgccaatgaatggggcaggagtggcaaagaccccaatcacttccgacctgctggcctgcctgagaaatactgagcttcctcttcactctgctctcaggagatctggctgtgaggccctcagggcagggatacaaagcggggagagggtacacaatgggtatctaataaatacttaagaggtggaatttgtggaaaaaaaaaaaaaaa

SEQ ID NO: 172 - DNA, 4326 bp, Homo sapiens
gctgagcgcggagccgcccggtgattggtgggggcggaagggggccgggcgccagcgctgccttttctcctgccgggtagtttcgctttcctgcgcagagtctgcggaggggctcggctgcaccggggggatcgcgcctggcagaccccagaccgagcagaggcgacccagcgcgctcgggagaggctgcaccgccgcgcccccgcctagcccttccggatcctgcgcgcagaaaagtttcatttgctgtatgccatcctcgagagctgtctaggttaacgttcgcactctgtgtatataacctcgacagtcttggcacctaacgtgctgtgcgtagctgctcctttggttgaatccccaggcccttgttggggcacaaggtggcaggatgtctcagtggtacgaacttcagcagcttgactcaaaattcctggagcaggttcaccagctttatgatgacagttttcccatggaaatcagacagtacctggcacagtggttagaaaagcaagactgggagcacgctgccaatgatgtttcatttgccaccatccgttttcatgacctcctgtcacagctggatgatcaatatagtcgcttttctttggagaataacttcttgctacagcataacataaggaaaagcaagcgtaatcttcaggataattttcaggaagacccaatccagatgtctatgatcatttacagctgtctgaaggaagaaaggaaaattctggaaaacgcccagagatttaatcaggctcagtcggggaatattcagagcacagtgatgttagacaaacagaaagagcttgacagtaaagtcagaaatgtgaaggacaaggttatgtgtatagagcatgaaatcaagagcctggaagatttacaagatgaatatgacttcaaatgcaaaaccttgcagaacagagaacacgagaccaatggtgtggcaaagagtgatcagaaacaagaacagctgttactcaagaagatgtatttaatgcttgacaataagagaaaggaagtagttcacaaaataatagagttgctgaatgtcactgaacttacccagaatgccctgattaatgatgaactagtggagtggaagcggagacagcagagcgcctgtattggggggccgcccaatgcttgcttggatcagctgcagaactggttcactatagttgcggagagtctgcagcaagttcggcagcagcttaaaaagttggaggaattggaacagaaatacacctacgaacatgaccctatcacaaaaaacaaacaagtgttatgggaccgcaccttcagtcttttccagcagctcattcagagctcgtttgtggtggaaagacagccctgcatgccaacgcaccctcagaggccgctggtcttgaagacaggggtccagttcactgtgaagttgagactgttggtgaaattgcaagagctgaattataatttgaaagtcaaagtcttatttgataaagatgtgaatgagagaaatacagtaaaaggatttaggaagttcaacattttgggcacgcacacaaaagtgatgaacatggaggagtccaccaatggcagtctggcggctgaatttcggcacctgcaattgaaagaacagaaaaatgctggcaccagaacgaatgagggtcctctcatcgttactgaagagcttcactcccttagttttgaaacccaattgtgccagcctggtttggtaattgacctcgagacgacctctctgcccgttgtggtgatctccaacgtcagccagctcccgagcggttgggcctccatcctttggtacaacatgctggtggcggaacccaggaatctgtccttcttcctgactccaccatgtgcacgatgggctcagctttcagaagtgctgagttggcagttttcttctgtcaccaaaagaggtctcaatgtggaccagctgaacatgttgggagagaagcttcttggtcctaacgccagccccgatggtctcattccgtggacgaggttttgtaaggaaaatataaatgataaaaattttcccttctggctttggattgaaagcatcctagaactcattaaaaaacacctgctccctctctggaatgatgggtgcatcatgggcttcatcagcaaggagcgagagcgtgccctgttgaaggaccagcagccggggaccttcctgctgcggttcagtgagagctcccgggaaggggccatcacattcacatgggtggagcggtcccagaacggaggcgaacctgacttccatgcggttgaaccctacacgaagaaagaactttctgctgttactttccctgacatcattcgcaattacaaagtcatggctgctgagaatattcctgagaatcccctgaagtatctgtatccaaatattgacaaagaccatgcctttggaaagtattactccaggccaaaggaagcaccagagccaatggaacttgatggccctaaaggaactggatatatcaagactgagttgatttctgtgtctgaagttcacccttctagacttcagaccacagacaacctgctccccatgtctcctgaggagtttgacgaggtgtctcggatagtgggctctgtagaattcgacagtatgatgaacacagtatagagcatgaatttttttcatcttctctggcgacagttttccttctcatctgtgattccctcctgctactctgttccttcacatcctgtgtttctagggaaatgaaagaaaggccagcaaattcgctgcaacctgttgatagcaagtgaatttttctctaactcagaaacatcagttactctgaagggcatcatgcatcttactgaaggtaaaattgaaaggcattctctgaagagtgggtttcacaagtgaaaaacatccagatacacccaaagtatcaggacgagaatgagggtcctttgggaaaggagaagttaagcaacatctagcaaatgttatgcataaagtcagtgcccaactgttataggttgttggataaatcagtggttatttagggaactgcttgacgtaggaacggtaaatttctgtgggagaattcttacatgttttctttgctttaagtgtaactggcagttttccattggtttacctgtgaaatagttcaaagccaagtttatatacaattatatcagtcctctttcaaaggtagccatcatggatctggtagggggaaaatgtgtattttattacatctttcacattggctatttaaagacaaagacaaattctgtttcttgagaagagaatattagctttactgtttgttatggcttaatgacactagctaatatcaatagaaggatgtacatttccaaattcacaagttgtgtttgatatccaaagctgaatacattctgctttcatcttggtcacatacaattatttttacagttctcccaagggagttaggctattcacaaccactcattcaaaagttgaaattaaccatagatgtagataaactcagaaatttaattcatgtttcttaaatgggctactttgtcctttttgttattagggtggtatttagtctattagccacaaaattgggaaaggagtagaaaaagcagtaactgacaacttgaataatacaccagagataatatgagaatcagatcatttcaaaactcatttcctatgtaactgcattgagaactgcatatgtttcgctgatatatgtgtttttcacatttgcgaatggttccattctctctcctgtactttttccagacacttttttgagtggatgatgtttcgtgaagtatactgtatttttacctttttccttccttatcactgacacaaaaagtagattaagagatgggtttgacaaggttcttcccttttacatactgctgtctatgtggctgtatcttgtttttccactactgctaccacaactatattatcatgcaaatgctgtattcttctttggtggagataaagatttcttgagttttgttttaaaattaaagctaaagtatctgtattgcattaaatataatatgcacacagtgctttccgtggcactgcatacaatctgaggcctcctctctcagtttttatatagatggcgagaacctaagtttcagttgattttacaattgaaatgactaaaaaacaaagaagacaacattaaaacaatattgtttctaattgctgaggtttagctgtcagttctttttgccctttgggaattcggcatggtttcattttactgcactagccaagagactttacttttaagaagtattaaaattctaaaattcaaaaaaaaaaaaaaaaaa

SEQ ID NO: 173 - DNA, 931 bp, Homo sapiens; identical to SEQ ID NO: 68

SEQ ID NO: 174 - DNA, 3682 bp, Homo sapiens
gcgagcgcagcggagcctggagagaaggcgctgggctgcgagggcgcgagggcgcgagggcagggggcaaccggaccccgcccgcacccatggcgcccgtcgccgtctgggccgcgctggccgtcggactggagctctgggctgcggcgcacgccttgcccgcccaggtggcatttacaccctacgccccggagcccgggagcacatgccggctcagagaatactatgaccagacagctcagatgtgctgcagcaaatgctcgccgggccaacatgcaaaagtcttctgtaccaagacctcggacaccgtgtgtgactcctgtgaggacagcacatacacccagctctggaactgggttcccgagtgcttgagctgtggctcccgctgtagctctgaccaggtggaaactcaagcctgcactcgggaacagaaccgcatctgcacctgcaggcccggctggtactgcgcgctgagcaagcaggaggggtgccggctgtgcgcgccgctgcgcaagtgccgcccgggcttcggcgtggccagaccaggaactgaaacatcagacgtggtgtgcaagccctgtgccccggggacgttctccaacacgacttcatccacggatatttgcaggccccaccagatctgtaacgtggtggccatccctgggaatgcaagcatggatgcagtctgcacgtccacgtcccccacccggagtatggccccaggggcagtacacttaccccagccagtgtccacacgatcccaacacacgcagccaactccagaacccagcactgctccaagcacctccttcctgctcccaatgggccccagccccccagctgaagggagcactggcgacttcgctcttccagttggactgattgtgggtgtgacagccttgggtctactaataataggagtggtgaactgtgtcatcatgacccaggtgaaaaagaagcccttgtgcctgcagagagaagccaaggtgcctcacttgcctgccgataaggcccggggtacacagggccccgagcagcagcacctgctgatcacagcgccgagctccagcagcagctccctggagagctcggccagtgcgttggacagaagggcgcccactcggaaccagccacaggcaccaggcgtggaggccagtggggccggggaggcccgggccagcaccgggagctcagattcttcccctggtggccatgggacccaggtcaatgtcacctgcatcgtgaacgtctgtagcagctctgaccacagctcacagtgctcctcccaagccagctccacaatgggagacacagattccagcccctcggagtccccgaaggacgagcaggtccccttctccaaggaggaatgtgcctttcggtcacagctggagacgccagagaccctgctggggagcaccgaagagaagcccctgccccttggagtgcctgatgctgggatgaagcccagttaaccaggccggtgtgggctgtgtcgtagccaaggtgggctgagccctggcaggatgaccctgcgaaggggccctggtccttccaggcccccaccactaggactctgaggctctttctgggccaagttcctctagtgccctccacagccgcagcctccctctgacctgcaggccaagagcagaggcagcgagttgtggaaagcctctgctgccatggcgtgtccctctcggaaggctggctgggcatggacgttcggggcatgctggggcaagtccctgactctctgtgacctgccccgcccagctgcacctgccagcctggcttctggagcccttgggttttttgtttgtttgtttgtttgtttgtttgtttctccccctgggctctgccccagctctggcttccagaaaaccccagcatccttttctgcagaggggctttctggagaggagggatgctgcctgagtcacccatgaagacaggacagtgcttcagcctgaggctgagactgcgggatggtcctggggctctgtgcagggaggaggtggcagccctgtagggaacggggtccttcaagttagctcaggaggcttggaaagcatcacctcaggccaggtgcagtggctcacgcctatgatcccagcactttgggaggctgaggcgggtggatcacctgaggttaggagttcgagaccagcctggccaacatggtaaaaccccatctctactaaaaatacagaaattagccgggcgtggtggcgggcacctatagtcccagctactcagaagcctgaggctgggaaatcgtttgaacccgggaagcggaggttgcagggagccgagatcacgccactgcactccagcctgggcgacagagcgagagtctgtctcaaaagaaaaaaaaaagcaccgcctccaaatgccaacttgtccttttgtaccatggtgtgaaagtcagatgcccagagggcccaggcaggccaccatattcagtgctgtggcctgggcaagataacgcacttctaactagaaatctgccaattttttaaaaaagtaagtaccactcaggccaacaagccaacgacaaagccaaactctgccagccacatccaaccccccacctgccatttgcaccctccgccttcactccggtgtgcctgcagccccgcgcctccttccttgctgtcctaggccacaccatctcctttcagggaatttcaggaactagagatgactgagtcctcgtagccatctctctactcctacctcagcctagaccctcctcctcccccagaggggtgggttcctcttccccactccccaccttcaattcctgggccccaaacgggctgccctgccactttggtacatggccagtgtgatcccaagtgccagtcttgtgtctgcgtctgtgttgcgtgtcgtgggtgtgtgtagccaaggtcggtaagttgaatggcctgccttgaagccactgaagctgggattcctccccattagagtcagccttccccctcccagggccagggccctgcagaggggaaaccagtgtagccttgcccggattctgggaggaagcaggttgaggggctcctggaaaggctcagtctcaggagcatggggataaaggagaaggcatgaaattgtctagcagagcaggggcagggtgataaattgttgataaattccactggacttgagcttggcagctgaactattggagggtgggagagcccagccattaccatggagacaagaagggttttccaccctggaatcaagatgtcagactggctggctgcagtgacgtgcacctgtactcaggaggctgaggggaggatcactggagcccaggagtttgaggctgcagcgagctatgatcgcgccactacactccagcctgagcaacagagtgagaccctgtctcttaaagaaaaaaaaagtcagactgctgggactggccaggtttctgcccacattggacccacatgaggacatgatggagcgcacctgccccctggtggacagtcctgggagaacctcaggcttccttggcatcacagggcagagccgggaagcgatgaatttggagactctgtggggccttggttcccttgtgtgtgtgtgttgatcccaagacaatgaaagtttgcactgtatgctggacggcattcctgcttatcaataaacctgtttgttttaaaaaaaa

SEQ ID NO: 175 - DNA, 1669 bp, Homo sapiens
gaggtataagagcctccaagtctgcagctctcgcccaactcccagacacctcgcgggctctgcagcaccggcaccgtttccaggaggcctggcggggtgtgcgtccagccgttgggcgctttctttttggacctcggggccatccacaccgtcccctccccctcccgcctccctccccgcctcccccgcgcgccctccccgcggaggtccctcccgtccgtcctcctgctctctcctccgcgggccgcatcgcccgggccggcgccgcgcgcgggggaagctggcgggctgaggcgccccgctcttctcctctgccccgggcccgcgaggccacgcgtcgccgctcgagagatgatgcaggacgtgtccagctcgccagtctcgccggccgacgacagcctgagcaacagcgaggaagagccagaccggcagcagccgccgagcggcaagcgcgggggacgcaagcggcgcagcagcaggcgcagcgcgggcggcggcgcggggcccggcggagccgcgggtgggggcgtcggaggcggcgacgagccgggcagcccggcccagggcaagcgcggcaagaagtctgcgggctgtggcggcggcggcggcgcgggcggcggcggcggcagcagcagcggcggcgggagtccgcagtcttacgaggagctgcagacgcagcgggtcatggccaacgtgcgggagcgccagcgcacccagtcgctgaacgaggcgttcgccgcgctgcggaagatcatccccacgctgccctcggacaagctgagcaagattcagaccctcaagctggcggccaggtacatcgacttcctctaccaggtcctccagagcgacgagctggactccaagatggcaagctgcagctatgtggctcacgagcggctcagctacgccttctcggtctggaggatggagggggcctggtccatgtccgcgtcccactagcaggcggagccccccaccccctcagcagggccggagacctagatgtcattgtttccagagaaggagaaaatggacagtctagagactctggagctggataactaaaaataaaaatatatgccaaagattttcttggaaattagaagagcaaaatccaaattcaaagaaacagggcgtggggcgcacttttaaaagagaaagcgagacaggcccgtggacagtgattcccagacgggcagcggcaccatcctcacacctctgcattctgatagaagtctgaacagttgtttgtgttttttttttttttttttttgacgaagaatgtttttatttttatttttttcatgcatgcattctcaagaggtcgtgccaatcagccactgaaaggaaaggcatcactatggactttctctattttaaaatggtaacaatcagaggaactataagaacacctttagaaataaaaatactgggatcaaactggcctgcaaaaccatagtcagttaattctttttttcatccttcctctgaggggaaaaacaaaaaaaaacttaaaatacaaaaaacaacattctatttatttattgaggacccatggtaaaatgcaaatagatccggtgtctaaatgcattcatatttttatgattgttttgtaaatatctttgtatatttttctgcaataaataaatataaaaaatttagagaaaaa

SEQ ID NO: 176 - DNA, 2195 bp, Homo sapiens; identical to SEQ ID NO: 138

SEQ ID NO: 177 - DNA, 5998 bp, Homo sapiens
gggggggaagggggagggagggggaggaggtgactcgagcatttagacacaagcgagaggatcatggcggatggccccaggtgtaagcgcagaaagcaggcgaacccgcggcgcaataacgttacaaattataatactgtggtagaaacaaattcagattcagatgatgaagacaaactgcatattgtggaagaagaaagtgttacagatgcagctgactgtgaaggtgtaccagaggatgacctgccaacagaccagacagtgttaccagggaggagcagtgaaagagaagggaatgctaagaactgctgggaggatgacagaaaggaagggcaagaaatcctggggcctgaagctcaggcagatgaagcaggatgtacagtaaaagatgatgaatgcgagtcagatgcagaaaatgagcaaaaccatgatcctaatgttgaagagtttctacaacaacaagacactgctgtcatttttcctgaggcacctgaagaggaccagaggcagggcacaccagaagccagtggtcatgatgaaaatggaacaccagatgcattttcacaattactcacctgtccatattgtgatagaggctataaacgctttacctctctgaaagaacacattaaatatcgtcatgaaaagaatgaagataactttagttgctccctgtgcagttacacctttgcatacagaacccaacttgaacgtcacatgacatcacataaatcaggaagagatcaaagacatgtgacgcagtctgggtgtaatcgtaaattcaaatgcactgagtgtggaaaagctttcaaatacaaacatcacctaaaagagcacttaagaattcacagtggagagaagccatatgaatgcccaaactgcaagaaacgcttttcccattctggctcctatagctcacacataagcagtaagaaatgtatcagcttgatacctgtgaatgggcgaccaagaacaggactcaagacatctcagtgttcttcaccgtctctttcagcatcaccaggcagtcccacacgaccacagatacggcaaaagatagagaataaaccccttcaagaacaactttctgttaaccaaattaaaactgaacctgtggattatgaattcaaacccatagtggttgcttcaggaatcaactgttcaacccctttacaaaatggggttttcactggtggtggcccattacaggcaaccagttctcctcagggcatggtgcaagctgttgttctgccaacagttggtttggtgtctcccataagtatcaatttaagtgatattcagaatgtacttaaagtggcggtagatggtaatgtaataaggcaagtgttggagaataatcaagccaatcttgcatccaaagaacaagaaacaatcaatgcttcacccatacaacaaggtggccattctgttatttcagccatcagtcttcctttggttgatcaagatggaacaaccaaaattatcatcaactacagtcttgagcagcctagccaacttcaagttgttcctcaaaatttaaaaaaagaaaatccagtcgctacaaacagttgtaaaagtgaaaagttaccagaagatcttactgttaagtctgagaaggacaaaagctttgaagggggggtgaatgatagcacttgtcttctgtgtgatgattgtccaggagatattaatgcacttccagaattaaagcactatgacctaaagcagcctactcagcctcctccactccctgcagcagaagctgagaagcctgagtcctctgtttcatcagctactggagatggcaatttgtctcctagtcagccacctttaaagaacctcttgtctctcctaaaagcatattatgctttgaatgcacaaccaagtgcagaagagctctcaaaaattgctgattcagtaaacctaccactggatgtagtaaaaaagtggtttgaaaagatgcaagctggacagatttcagtgcagtcttctgaaccatcttctcctgaaccaggcaaagtaaatatccctgccaagaacaatgatcagcctcaatctgcaaatgcaaatgaaccccaggacagcacagtaaatctacaaagtcctttgaagatgactaactccccagttttaccagtgggatcaaccaccaatggttccagaagtagtacaccatccccatcacctctaaacctttcctcatccagaaatacacagggttacttgtacacagctgagggtgcacaagaagagccacaagtagaacctcttgatctttcactaccaaagcaacagggagaattattagaaaggtcaactatcactagtgtttaccagaacagtgtttattctgtccaggaagaacccttgaacttgtcttgcgcaaaaaaggagccacaaaaggacagttgtgttacagactcagaaccagttgtaaatgtaatcccaccaagtgccaaccccataaatatcgctatacctacagtcactgcccagttacccacaatcgtggccattgctgaccagaacagtgttccatgcttaagagcgctagctgccaataagcaaacgattctgattccccaggtggcatacacctactcaactacggtcagccctgcagtccaagaaccacccttgaaagtgatccagccaaatggaaatcaggatgaaagacaagatactagctcagaaggagtatcaaatgtagaggatcagaatgactctgattctacaccgcccaaaaagaaaatgcggaagacagaaaatggaatgtatgcttgtgatttgtgtgacaagatattccaaaagagtagttcattattgagacataaatatgaacacacaggtaaaagacctcatgagtgtggaatctgtaaaaaggcatttaaacacaaacatcatttgattgaacacatgcgattacattctggagaaaagccctatcaatgtgacaaatgtggaaagcgcttctcacactctgggtcttattctcaacacatgaatcatcgctactcctactgtaagagagaagcggaagaacgtgacagcacagagcaggaagaggcagggcctgaaatcctctcgaatgagcacgtgggtgccagggcgtctccctcacagggcgactcggacgagagagagagtttgacaagggaagaggatgaagacagtgaaaaagaggaagaggaggaggataaagagatggaagaattgcaggaagaaaaagaatgtgaaaaaccacaaggggatgaggaagaggaggaggaggaggaagaagtggaagaagaagaggtagaagaggcagagaatgagggagaagaagcaaaaactgaaggtctgatgaaggatgacagggctgaaagtcaagcaagcagcttaggacaaaaagtaggcgagagtagtgagcaagtgtctgaagaaaagacaaatgaagcctaatcgtttttctagaaggaaaataaattctaattgataatgaatttcgttcaatattatccttgcttttcatggaaacacagtaacctgtatgctgtgattcctgttcactactgtgtaaagtaaaaactaaaaaaatacaaaatacaaaacacacacacacacacacacacacacacacacacacacacaaaataaatccgggtgtgcctgaacctcagacctagtaatttttcatgcagttttcaaagttaggaacaagtttgtaacatgcagcagattagaaaaccttaatgactcagagagcaacaatacaagaggttaaaggaagctgattaattagatatgcatctggcattgttttatcttatcagtattatcactcttatgttggtttattcttaagctgtacaattgggagaaattttataattttttattggtaaacatatgctaaatccgcttcagtattttattatgttttttaaaatgtgagaacttctgcactacaaaattcccttcacagagaagtataatgtagttccaacccgtgctaactaccttttataaattcagtctagaaggtagtaatttctaatatttagatgtcttagtagagcgtattatcatttaaagtgtattgttagccttaagaaagcagctgatagaagaactgaagtttcttactcacgtggtttaaaatggagttcaaaagattgccattgagttctgattgcagggactaacaatgttaatctgataaggacagcaaaatcatcagaatcagtgtttgtgattgtgtttgaatatgtggtaacatatgaaggatatgacatgaagctttgtatctcctttggccttaagcaagacctgtgtgctgtaagtgccatttctcagtattttcaaggctctaacccgccttcatccaatgtgtggcctacaataactagcatttgttgatttgtctcttgtatcaaaattcccaaataaaacttaaaaccactgactctgtcagagaaactgaaacactgggacatttcatccttcaattcctcggtattgattttatgttgattgattttcagaatttctctacagaaacgaaagggaaattttctaatctgctttatccatgtacttgcatttcagacatggacatgctattgttatttggctcataactgtttccaaatgttagttattatggacccaatttattaacaacattagctgatttttacctatcagtattattttatttcttttagtttatagatctgtgcaacatttttgtactgtatgtcttcaaacctggcagtattaatacccttcttactgacatatgtacttttagttttagaaaacttttatatttatgtgtcttatttttatatttctttatttattacacagtgtagtgtataatactgtagtttgtattaatacaataatatattttagtatgaaaatttggaaagttgataagatttaaagtagagatgcaattggttctcctgcattgagatttgatttaacagtgttatgttaacatttatacttgccttggactgtagaacagaacttaaatgggaatgtattagttttacaactacaatcaagtcattttacctttacccagtttttaatataaaacttaaattttgaaattcactgtgtgactaatagcatgatgctctgcagttttattaagaaatcagcctaaccatacaactctcatttccttagtaagccaaattaggattaacttctataaacagtgttgggaacaatgtttaacattttgtgccaatttgttcctgtattcatgtatgtaagttacagatctgactcttcatttttaagttccttgttacatcatggtcattttctagttttttaccagactcccatctcacaataaaatgcatcaacaagcctgaactgctgtcattcttttcatcattatcagtattttctttggaaaactgtgaaatggggtacattgtcatcctgcatttgattcatcttgagctgaatttgggtaacactaaatgttttagacattctccactaaattatggattttcttgtggctaaatgtttctggagaggtcagagttgacaaaacctcttcacaggttgctccttcttcctgaaatccttaatcctccgcatttcatgcttcaggtcatttcagggaagcctgggtttagatgcctttctgactctcagctcctgcacttctgtcatcatacctctgatactattatttatattccttccccactaggaacaggaaccacatttgtcatagtcactctcacattcctcactgcctaacagggtgcctggcataagttgggacaacagatatttgttgaataaaaatataatttgcatgtttatggagctcagctatgttctcactttttttgcttctaattccagaatatatgttaaatgatctaataatttgattattttcttataagtcttattaaacactagtcataatagacacaataaattatgccttctttttctattgccttaaaaaaaaaaa

SEQ ID NO: 178 - DNA, 1864 bp, Homo sapiens
ctggcggctcttgggactggcggggctgcgcgcggggttagggtgggggtacgggaaggctcaacccaggacctgcgtaccttgctttgggggcgcactaagcacctgccgggagcagggggcgcaccgggaactcgcagatttcgccagttgggcgcactggggatctgtggactgcgtccgggggatgggctagggggacatgcgcacgctttgggccttacagaatgtgatcgcgcgagggggagggcgaagcgtggcgggagggcgaggcgaaggaaggagggcgtgagaaaggcgacggcggcggcgcggaggagggttatctatacatttaaaaaccagccgcctgcgccgcgcctgcggagacctgggagagtccggccgcacgcgcgggacacgagcgtcccacgctccctggcgcgtacggcctgccaccactaggcctcctatccccgggctccagacgacctaggacgcgtgccctggggagttgcctggcggcgccgtgccagaagcccccttggggcgccacagttttccccgtcgcctccggttcctctgcctgcaccttcctgcggcgcgccgggacctggagcgggcgggtggatgcaggcgcgatggacggcggcacactgcccaggtccgcgccccctgcgccccccgtccctgtcggctgcgctgcccggcggagacccgcgtccccggaactgttgcgctgcagccggcggcggcgaccggccaccgcagagaccggaggcggcgcagcggccgtagcgcggcgcaatgagcgcgagcgcaaccgcgtgaagctggtgaacttgggcttccaggcgctgcggcagcacgtgccgcacggcggcgccagcaagaagctgagcaaggtggagacgctgcgctcagccgtggagtacatccgcgcgctgcagcgcctgctggccgagcacgacgccgtgcgcaacgcgctggcgggagggctgaggccgcaggccgtgcggccgtctgcgccccgcgggccgccagggaccaccccggtcgccgcctcgccctcccgcgcttcttcgtccccgggccgcgggggcagctcggagcccggctccccgcgttccgcctactcgtcggacgacagcggctgcgaaggcgcgctgagtcctgcggagcgcgagctactcgacttctccagctggttagggggctactgagcgccctcgacctatgagcctcagccccggaagccgagcgagcggccggcgcgctcatcgccggggagcccgccaggtggaccggcccgcgctccgcccccagcgagccggggacccacccaccaccccccgcaccgccgacgccgcctcgttcgtccggcccagcctgaccaatgccgcggtggaaacgggcttggagctggccccataagggctggcggcttcctccgacgccgcccctccccacagcttctcgactgcagtggggcggggggcaccaacacttggagatttttccggaggggagaggattttctaagggcacagagaatccattttctacacattaacttgagctgctggagggacactgctggcaaacggagacctatttttgtacaaagaacccttgacctggggcgtaataaagatgacctggacccctgcccccactatctggagttttccatgctggccaagatctggacacgagcagtccctgaggggcggggtccctggcgtgaggcccccgtgacagcccaccctggggtgggtttgtgggcactgctgctctgctagggagaagcctgtgtggggcacacctcttcaagggagcgtgaactttataaataaatcagttctgtttaaaaaaaaaaaaaaaa

SEQ ID NO: 179 - DNA, 6492 bp, Homo sapiens; identical to SEQ ID NO: 72

SEQ ID NO: 180 - DNA, 4304 bp, Homo sapiens; identical to SEQ ID NO: 116

SEQ ID NO: 181 - DNA, 5748 bp, Homo sapiens
gagaagaaagccagtgcgtctctgggcgcaggggccagtggggctcggaggcacaggcaccccgcgacactccaggttccccgacccacgtccctggcagccccgattatttacagcctcagcagagcacggggcgggggcagaggggcccgcccgggagggctgctacttcttaaaacctctgcgggctgcttagtcacagccccccttgcttgggtgtgtccttcgctcgctccctccctccgtcttaggtcactgttttcaacctcgaataaaaactgcagccaacttccgaggcagcctcattgcccagcggaccccagcctctgccaggttcggtccgccatcctcgtcccgtcctccgccggcccctgccccgcgcccagggatcctccagctcctttcgcccgcgccctccgttcgctccggacaccatggacaagttttggtggcacgcagcctggggactctgcctcgtgccgctgagcctggcgcagatcgatttgaatataacctgccgctttgcaggtgtattccacgtggagaaaaatggtcgctacagcatctctcggacggaggccgctgacctctgcaaggctttcaatagcaccttgcccacaatggcccagatggagaaagctctgagcatcggatttgagacctgcaggtatgggttcatagaagggcacgtggtgattccccggatccaccccaactccatctgtgcagcaaacaacacaggggtgtacatcctcacatccaacacctcccagtatgacacatattgcttcaatgcttcagctccacctgaagaagattgtacatcagtcacagacctgcccaatgcctttgatggaccaattaccataactattgttaaccgtgatggcacccgctatgtccagaaaggagaatacagaacgaatcctgaagacatctaccccagcaaccctactgatgatgacgtgagcagcggctcctccagtgaaaggagcagcacttcaggaggttacatcttttacaccttttctactgtacaccccatcccagacgaagacagtccctggatcaccgacagcacagacagaatccctgctaccactttgatgagcactagtgctacagcaactgagacagcaaccaagaggcaagaaacctgggattggttttcatggttgtttctaccatcagagtcaaagaatcatcttcacacaacaacacaaatggctggtacgtcttcaaataccatctcagcaggctgggagccaaatgaagaaaatgaagatgaaagagacagacacctcagtttttctggatcaggcattgatgatgatgaagattttatctccagcaccatttcaaccacaccacgggcttttgaccacacaaaacagaaccaggactggacccagtggaacccaagccattcaaatccggaagtgctacttcagacaaccacaaggatgactgatgtagacagaaatggcaccactgcttatgaaggaaactggaacccagaagcacaccctcccctcattcaccatgagcatcatgaggaagaagagaccccacattctacaagcacaatccaggcaactcctagtagtacaacggaagaaacagctacccagaaggaacagtggtttggcaacagatggcatgagggatatcgccaaacacccaaagaagactcccattcgacaacagggacagctgcagcctcagctcataccagccatccaatgcaaggaaggacaacaccaagcccagaggacagttcctggactgatttcttcaacccaatctcacaccccatgggacgaggtcatcaagcaggaagaaggatggatatggactccagtcatagtataacgcttcagcctactgcaaatccaaacacaggtttggtggaagatttggacaggacaggacctctttcaatgacaacgcagcagagtaattctcagagcttctctacatcacatgaaggcttggaagaagataaagaccatccaacaacttctactctgacatcaagcaataggaatgatgtcacaggtggaagaagagacccaaatcattctgaaggctcaactactttactggaaggttatacctctcattacccacacacgaaggaaagcaggaccttcatcccagtgacctcagctaagactgggtcctttggagttactgcagttactgttggagattccaactctaatgtcaatcgttccttatcaggagaccaagacacattccaccccagtggggggtcccataccactcatggatctgaatcagatggacactcacatgggagtcaagaaggtggagcaaacacaacctctggtcctataaggacaccccaaattccagaatggctgatcatcttggcatccctcttggccttggctttgattcttgcagtttgcattgcagtcaacagtcgaagaaggtgtgggcagaagaaaaagctagtgatcaacagtggcaatggagctgtggaggacagaaagccaagtggactcaacggagaggccagcaagtctcaggaaatggtgcatttggtgaacaaggagtcgtcagaaactccagaccagtttatgacagctgatgagacaaggaacctgcagaatgtggacatgaagattggggtgtaacacctacaccattatcttggaaagaaacaaccgttggaaacataaccattacagggagctgggacacttaacagatgcaatgtgctactgattgtttcattgcgaatcttttttagcataaaattttctactctttttgttttttgtgttttgttctttaaagtcaggtccaatttgtaaaaacagcattgctttctgaaattagggcccaattaataatcagcaagaatttgatcgttccagttcccacttggaggcctttcatccctcgggtgtgctatggatggcttctaacaaaaactacacatatgtattcctgatcgccaacctttcccccaccagctaaggacatttcccagggttaatagggcctggtccctgggaggaaatttgaatgggtccattttgcccttccatagcctaatccctgggcattgctttccactgaggttgggggttggggtgtactagttacacatcttcaacagaccccctctagaaatttttcagatgcttctgggagacacccaaagggtgaagctatttatctgtagtaaactatttatctgtgtttttgaaatattaaaccctggatcagtcctttgatcagtataattttttaaagttactttgtcagaggcacaaaagggtttaaactgattcataataaatatctgtacttcttcgatcttcaccttttgtgctgtgattcttcagtttctaaaccagcactgtctgggtccctacaatgtatcaggaagagctgagaatggtaaggagactcttctaagtcttcatctcagagaccctgagttcccactcagacccactcagccaaatctcatggaagaccaaggagggcagcactgtttttgttttttgttttttgttttttttttttgacactgtccaaaggttttccatcctgtcctggaatcagagttggaagctgaggagcttcagcctcttttatggtttaatggccacctgttctctcctgtgaaaggctttgcaaagtcacattaagtttgcatgacctgttatccctggggccctatttcatagaggctggccctattagtgatttccaaaaacaatatggaagtgccttttgatgtcttacaataagagaagaagccaatggaaatgaaagagattggcaaaggggaaggatgatgccatgtagatcctgtttgacatttttatggctgtatttgtaaacttaaacacaccagtgtctgttcttgatgcagttgctatttaggatgagttaagtgcctggggagtccctcaaaaggttaaagggattcccatcattggaatcttatcaccagataggcaagtttatgaccaaacaagagagtactggctttatcctctaacctcatattttctcccacttggcaagtcctttgtggcatttattcatcagtcagggtgtccgattggtcctagaacttccaaaggctgcttgtcatagaagccattgcatctataaagcaacggctcctgttaaatggtatctcctttctgaggctcctactaaaagtcatttgttacctaaacttatgtgcttaacaggcaatgcttctcagaccacaaagcagaaagaagaagaaaagctcctgactaaatcagggctgggcttagacagagttgatctgtagaatatctttaaaggagagatgtcaactttctgcactattcccagcctctgctcctccctgtctaccctctcccctccctctctccctccacttcaccccacaatcttgaaaaacttcctttctcttctgtgaacatcattggccagatccattttcagtggtctggatttctttttattttcttttcaacttgaaagaaactggacattaggccactatgtgttgttactgccactagtgttcaagtgcctcttgttttcccagagatttcctgggtctgccagaggcccagacaggctcactcaagctctttaactgaaaagcaacaagccactccaggacaaggttcaaaatggttacaacagcctctacctgtcgccccagggagaaaggggtagtgatacaagtctcatagccagagatggttttccactccttctagatattcccaaaaagaggctgagacaggaggttattttcaattttattttggaattaaatacttttttccctttattactgttgtagtccctcacttggatatacctctgttttcacgatagaaataagggaggtctagagcttctattccttggccattgtcaacggagagctggccaagtcttcacaaacccttgcaacattgcctgaagtttatggaataagatgtattctcactcccttgatctcaagggcgtaactctggaagcacagcttgactacacgtcatttttaccaatgattttcaggtgacctgggctaagtcatttaaactgggtctttataaaagtaaaaggccaacatttaattattttgcaaagcaacctaagagctaaagatgtaatttttcttgcaattgtaaatcttttgtgtctcctgaagacttcccttaaaattagctctgagtgaaaaatcaaaagagacaaaagacatcttcgaatccatatttcaagcctggtagaattggcttttctagcagaacctttccaaaagttttatattgagattcataacaacaccaagaattgattttgtagccaacattcattcaatactgttatatcagaggagtaggagagaggaaacatttgacttatctggaaaagcaaaatgtacttaagaataagaataacatggtccattcacctttatgttatagatatgtctttgtgtaaatcatttgttttgagttttcaaagaatagcccattgttcattcttgtgctgtacaatgaccactgttattgttactttgacttttcagagcacacccttcctctggtttttgtatatttattgatggatcaataataatgaggaaagcatgatatgtatattgctgagttgaaagcacttattggaaaatattaaaaggctaacattaaaagactaaaggaaacagaaaaaaaaaaaaaaaaa

SEQ ID NO: 182 - DNA, 479 bp, Homo sapiens
acacatctgctcctgctctctctcctccagcgaccctagccatgagaaccctcaccatcctcactgctgttctcctcgtggccctccaggccaaggctgagccactccaagctgaggatgatccactgcaggcaaaagcttatgaggctgatgcccaggagcagcgtggggcaaatgaccaggactttgccgtctcctttgcagaggatgcaagctcaagtcttagagctttgggctcaacaagggctttcacttgccattgcagaaggtcctgttattcaacagaatattcctatgggacctgcactgtcatgggtattaaccacagattctgctgcctctgagggatgagaacagagagaaatatattcataatttactttatgacctagaaggaaactgtcgtgtgtcctatacattgccatcaactttgtttcctcatctcaaataaagtcctttcagcaagttaaaaaaaaaaa

SEQ ID NO: 183 - DNA, 4866 bp, Homo sapiens
cattctgctggctgcgcggtggcggcggctgtgtgtgcgccgcgccttgccgccccccctggccccccgagcccggggcgcgcgctcccgcccgggccgtccgggccccgcggcgccgcggcccgaggccccgggaagcgcagccatggctctgcggaggctgggggccgcgctgctgctgctgccgctgctcgccgccgtggaagaaacgctaatggactccactacagcgactgctgagctgggctggatggtgcatcctccatcagggtgggaagaggtgagtggctacgatgagaacatgaacacgatccgcacgtaccaggtgtgcaacgtgtttgagtcaagccagaacaactggctacggaccaagtttatccggcgccgtggcgcccaccgcatccacgtggagatgaagttttcggtgcgtgactgcagcagcatccccagcgtgcctggctcctgcaaggagaccttcaacctctattactatgaggctgactttgactcggccaccaagaccttccccaactggatggagaatccatgggtgaaggtggataccattgcagccgacgagagcttctcccaggtggacctgggtggccgcgtcatgaaaatcaacaccgaggtgcggagcttcggacctgtgtcccgcagcggcttctacctggccttccaggactatggcggctgcatgtccctcatcgccgtgcgtgtcttctaccgcaagtgcccccgcatcatccagaatggcgccatcttccaggaaaccctgtcgggggctgagagcacatcgctggtggctgcccggggcagctgcatcgccaatgcggaagaggtggatgtacccatcaagctctactgtaacggggacggcgagtggctggtgcccatcgggcgctgcatgtgcaaagcaggcttcgaggccgttgagaatggcaccgtctgccgaggttgtccatctgggactttcaaggccaaccaaggggatgaggcctgtacccactgtcccatcaacagccggaccacttctgaaggggccaccaactgtgtctgccgcaatggctactacagagcagacctggaccccctggacatgccctgcacaaccatcccctccgcgccccaggctgtgatttccagtgtcaatgagacctccctcatgctggagtggacccctccccgcgactccggaggccgagaggacctcgtctacaacatcatctgcaagagctgtggctcgggccggggtgcctgcacccgctgcggggacaatgtacagtacgcaccacgccagctaggcctgaccgagccacgcatttacatcagtgacctgctggcccacacccagtacaccttcgagatccaggctgtgaacggcgttactgaccagagccccttctcgcctcagttcgcctctgtgaacatcaccaccaaccaggcagctccatcggcagtgtccatcatgcatcaggtgagccgcaccgtggacagcattaccctgtcgtggtcccagccggaccagcccaatggcgtgatcctggactatgagctgcagtactatgagaaggagctcagtgagtacaacgccacagccataaaaagccccaccaacacggtcaccgtgcagggcctcaaagccggcgccatctatgtcttccaggtgcgggcacgcaccgtggcaggctacgggcgctacagcggcaagatgtacttccagaccatgacagaagccgagtaccagacaagcatccaggagaagttgccactcatcatcggctcctcggccgctggcctggtcttcctcattgctgtggttgtcatcgccatcgtgtgtaacagacgggggtttgagcgtgctgactcggagtacacggacaagctgcaacactacaccagtggccacatgaccccaggcatgaagatctacatcgatcctttcacctacgaggaccccaacgaggcagtgcgggagtttgccaaggaaattgacatctcctgtgtcaaaattgagcaggtgatcggagcaggggagtttggcgaggtctgcagtggccacctgaagctgccaggcaagagagagatctttgtggccatcaagacgctcaagtcgggctacacggagaagcagcgccgggacttcctgagcgaagcctccatcatgggccagttcgaccatcccaacgtcatccacctggagggtgtcgtgaccaagagcacacctgtgatgatcatcaccgagttcatggagaatggctccctggactcctttctccggcaaaacgatgggcagttcacagtcatccagctggtgggcatgcttcggggcatcgcagctggcatgaagtacctggcagacatgaactatgttcaccgtgacctggctgcccgcaacatcctcgtcaacagcaacctggtctgcaaggtgtcggactttgggctctcacgctttctagaggacgatacctcagaccccacctacaccagtgccctgggcggaaagatccccatccgctggacagccccggaagccatccagtaccggaagttcacctcggccagtgatgtgtggagctacggcattgtcatgtgggaggtgatgtcctatggggagcggccctactgggacatgaccaaccaggatgtaatcaatgccattgagcaggactatcggctgccaccgcccatggactgcccgagcgccctgcaccaactcatgctggactgttggcagaaggaccgcaaccaccggcccaagttcggccaaattgtcaacacgctagacaagatgatccgcaatcccaacagcctcaaagccatggcgcccctctcctctggcatcaacctgccgctgctggaccgcacgatccccgactacaccagctttaacacggtggacgagtggctggaggccatcaagatggggcagtacaaggagagcttcgccaatgccggcttcacctcctttgacgtcgtgtctcagatgatgatggaggacattctccgggttggggtcactttggctggccaccagaaaaaaatcctgaacagtatccaggtgatgcgggcgcagatgaaccagattcagtctgtggaggtttgacattcacctgcctcggctcacctcttcctccaagccccgccccctctgccccacgtgccggccctcctggtgctctatccactgcagggccagccactcgccaggaggccacgggccacgggaagaaccaagcggtgccagccacgagacgtcaccaagaaaacatgcaactcaaacgacggaaaaaaaaagggaatgggaaaaaagaaaacagatcctgggagggggcgggaaatacaaggaatattttttaaagaggattctcataaggaaagcaatgactgttcttgcgggggataaaaaagggcttgggagattcatgcgatgtgtccaatcggagacaaaagcagtttctctccaactccctctgggaaggtgacctggccagagccaagaaacactttcagaaaaacaaatgtgaaggggagagacaggggccgcccttggctcctgtccctgctgctcctctaggcctcactcaacaaccaagcgcctggaggacgggacagatggacagacagccaccctgagaacccctctgggaaaatctattcctgccaccactgggcaaacagaagaatttttctgtctttggagagtattttagaaactccaatgaaagacactgtttctcctgttggctcacagggctgaaaggggcttttgtcctcctgggtcagggagaacgcggggaccccagaaaggtcagccttcctgaggatgggcaacccccaggtctgcagctccaggtacatatcacgcgcacagcctggcagcctggccctcctggtgcccactcccgccagcccctgcctcgaggactgatactgcagtgactgccgtcagctccgactgccgctgagaagggttgatcctgcatctgggtttgtttacagcaattcctggactcgggggtattttggtcacagggtggttttggtttagggggtttgtttgttgggttgttttttgttttttggttttttttaatgacaatgaagtgacactttgacatttcctaccttttgaggacttgatccttctccaggaagaaggtgctttctgcttactgacttaggcaatacaccaagggcgagattttatatgcacatttctggatttttttatacggttttcattgacactcttccctcctcccacctgccaccaggcctcaccaaagcccactgccatggggccatctgggccattcagagactggagtgagatttgggtgtggagggggaggcgccaaggtggaggagcttcccactccaggactgttgatgaaagggacagattgaggaggaagtgggctctgaggctgcagggctggaagtccttgcccacttcccactctcctgccccaatctatctagtacttcccaggcaaataggcccctttgaggctcctgagtgccctcagatggtcaaaacccagttttccctctgggagcctaaaccaggctgcatcggaggccaggacccggatcattcactgtgataccctgccctccagagggtgcgctcagagacacgggcaagcatgcctcttcccttccctggagagaaagtgtgtgatttctctcccacctccttccccccaccagacctttgctgggcctaaaggtcttggccatggggacgccctcagtctagggatctggccacagactccctcctgtgaaccaacacagacacccaagcagagcaatcagttagtgaattgaatggaaataaacgctttagttataatatga

SEQ ID NO: 184 - DNA, 3851 bp, Homo sapiens
ctctcccaaccgcctcgtcgcactcctcaggctgagagcaccgctgcactcgcggccggcgatgcgggaccccggcgcggccgctccgctttcgtccctgggcctctgtgccctggtgctggcgctgctgggcgcactgtccgcgggcgccggggcgcagccgtaccacggagagaagggcatctccgtgccggaccacggcttctgccagcccatctccatcccgctgtgcacggacatcgcctacaaccagaccatcctgcccaacctgctgggccacacgaaccaagaggacgcgggcctcgaggtgcaccagttctacccgctggtgaaggtgcagtgttctcccgaactccgctttttcttatgctccatgtatgcgcccgtgtgcaccgtgctcgatcaggccatcccgccgtgtcgttctctgtgcgagcgcgcccgccagggctgcgaggcgctcatgaacaagttcggcttccagtggcccgagcggctgcgctgcgagaacttcccggtgcacggtgcgggcgagatctgcgtgggccagaacacgtcggacggctccgggggcccaggcggcggccccactgcctaccctaccgcgccctacctgccggacctgcccttcaccgcgctgcccccgggggcctcagatggcagggggcgtcccgccttccccttctcatgcccccgtcagctcaaggtgcccccgtacctgggctaccgcttcctgggtgagcgcgattgtggcgccccgtgcgaaccgggccgtgccaacggcctgatgtactttaaggaggaggagaggcgcttcgcccgcctctgggtgggcgtgtggtccgtgctgtgctgcgcctcgacgctctttaccgttctcacctacctggtggacatgcggcgcttcagctacccagagcggcccatcatcttcctgtcgggctgctacttcatggtggccgtggcgcacgtggccggcttccttctagaggaccgcgccgtgtgcgtggagcgcttctcggacgatggctaccgcacggtggcgcagggcaccaagaaggagggctgcaccatcctcttcatggtgctctacttcttcggcatggccagctccatctggtgggtcattctgtctctcacttggttcctggcggccggcatgaagtggggccacgaggccatcgaggccaactcgcagtacttccacctggccgcgtgggccgtgcccgccgtcaagaccatcactatcctggccatgggccaggtagacggggacctgctgagcggggtgtgctacgttggcctctccagtgtggacgcgctgcggggcttcgtgctggcgcctctgttcgtctacctcttcataggcacgtccttcttgctggccggcttcgtgtccctcttccgtatccgcaccatcatgaaacacgacggcaccaagaccgagaagctggagaagctcatggtgcgcatcggcgtcttcagcgtgctctacacagtgcccgccaccatcgtcctggcctgctacttctacgagcaggccttccgcgagcactgggagcgcacctggctcctgcagacgtgcaagagctatgccgtgccctgcccgcccggccacttcccgcccatgagccccgacttcaccgtcttcatgatcaagtacctgatgaccatgatcgtcggcatcaccactggcttctggatctggtcgggcaagaccctgcagtcgtggcgccgcttctaccacagacttagccacagcagcaagggggagactgcggtatgagccccggcccctccccacctttcccaccccagccctcttgcaagaggagaggcacggtagggaaaagaactgctgggtgggggcctgtttctgtaactttctccccctctactgagaagtgacctggaagtgagaagttctttgcagatttggggcgaggggtgatttggaaaagaagacctgggtggaaagcggtttggatgaaaagatttcaggcaaagacttgcaggaagatgatgataacggcgatgtgaatcgtcaaaggtacgggccagcttgtgcctaatagaaggttgagaccagcagagactgctgtgagtttctcccggctccgaggctgaacggggactgtgagcgatccccctgctgcagggcgagtggcctgtccagacccctgtgaggccccgggaaaggtacagccctgtctgcggtggctgctttgttggaaagagggagggcctcctgcggtgtgcttgtcaagcagtggtcaaaccataatctcttttcactggggccaaactggagcccagatgggttaatttccagggtcagacattacggtctctcctcccctgccccctcccgcctgtttttcctcccgtactgctttcaggtcttgtaaaataagcatttggaagtcttgggaggcctgcctgctagaatcctaatgtgaggatgcaaaagaaatgatgataacattttgagataaggccaaggagacgtggagtaggtatttttgctactttttcattttctggggaaggcaggaggcagaaagacgggtgttttatttggtctaataccctgaaaagaagtgatgacttgttgcttttcaaaacaggaatgcatttttccccttgtctttgttgtaagagacaaaagaggaaacaaaagtgtctccctgtggaaaggcataactgtgacgaaagcaacttttataggcaaagcagcgcaaatctgaggtttcccgttggttgttaatttggttgagataaacattcctttttaaggaaaagtgaagagcagtgtgctgtcacacaccgttaagccagaggttctgacttcgctaaaggaaatgtaagaggttttgttgtctgttttaaataaatttaattcggaacacatgatccaacagactatgttaaaatattcagggaaatctctcccttcatttactttttcttgctataagcctatatttaggtttcttttctatttttttctcccatttggatcctttgaggtaaaaaaacataatgtcttcagcctcataataaaggaaagttaattaaaaaaaaaaagcaaagagccattttgtcctgttttcttggttccatcaatctgtttattaaacatcatccatatgctgaccctgtctctgtgtggttgggttgggaggcgatcagcagataccatagtgaacgaagaggaaggtttgaaccatgggccccatctttaaagaaagtcattaaaagaaggtaaacttcaaagtgattctggagttctttgaaatgtgctggaagacttaaatttattaatcttaaatcatgtactttttttctgtaatagaactcggattcttttgcatgatggggtaaagcttagcagagaatcatgggagctaacctttatcccacctttgacactaccctccaatcttgcaacactatcctgtttctcagaacagtttttaaatgccaatcatagagggtactgtaaagtgtacaagttactttatatatgtaatgttcacttgagtggaactgctttttacattaaagttaaaatcgatcttgtgtttcttcaaccttcaaaactatctcatctgtcagatttttaaaactccaacacaggttttggcatcttttgtgctgtatcttttaagtgcatgtgaaatttgtaaaatagagataagtacagtatgtatattttgtaaatctcccatttttgtaagaaaatatatattgtatttatacatttttactttggatttttgttttgttggctttaaaggtctaccccactttatcacatgtacagatcacaaataaatttttttaaatac

SEQ ID NO: 185 - DNA, 1718 bp, Homo sapiens; identical to SEQ ID NO: 98

SEQ ID NO: 186 - DNA, 7080 bp, Homo sapiens
gagctagcgctcaagcagagcccagcgcggtgctatcggacagagcctggcgagcgcaagcggcgcggggagccagcggggctgagcgcggccagggtctgaacccagatttcccagactagctaccactccgcttgcccacgccccgggagctcgcggcgcctggcggtcagcgaccagacgtccggggccgctgcgctcctggcccgcgaggcgtgacactgtctcggctacagacccagagggagcacactgccaggatgggagctgctgggaggcaggacttcctcttcaaggccatgctgaccatcagctggctcactctgacctgcttccctggggccacatccacagtggctgctgggtgccctgaccagagccctgagttgcaaccctggaaccctggccatgaccaagaccaccatgtgcatatcggccagggcaagacactgctgctcacctcttctgccacggtctattccatccacatctcagagggaggcaagctggtcattaaagaccacgacgagccgattgttttgcgaacccggcacatcctgattgacaacggaggagagctgcatgctgggagtgccctctgccctttccagggcaatttcaccatcattttgtatggaagggctgatgaaggtattcagccggatccttactatggtctgaagtacattggggttggtaaaggaggcgctcttgagttgcatggacagaaaaagctctcctggacatttctgaacaagacccttcacccaggtggcatggcagaaggaggctatttttttgaaaggagctggggccaccgtggagttattgttcatgtcatcgaccccaaatcaggcacagtcatccattctgaccggtttgacacctatagatccaagaaagagagtgaacgtctggtccagtatttgaacgcggtgcccgatggcaggatcctttctgttgcagtgaatgatgaaggttctcgaaatctggatgacatggccaggaaggcgatgaccaaattgggaagcaaacacttcctgcaccttggatttagacacccttggagttttctaactgtgaaaggaaatccatcatcttcagtggaagaccatattgaatatcatggacatcgaggctctgctgctgcccgggtattcaaattgttccagacagagcatggcgaatatttcaatgtttctttgtccagtgagtgggttcaagacgtggagtggacggagtggttcgatcatgataaagtatctcagactaaaggtggggagaaaatttcagacctctggaaagctcacccaggaaaaatatgcaatcgtcccattgatatacaggccactacaatggatggagttaacctcagcaccgaggttgtctacaaaaaaggccaggattataggtttgcttgctacgaccggggcagagcctgccggagctaccgtgtacggttcctctgtgggaagcctgtgaggcccaaactcacagtcaccattgacaccaatgtgaacagcaccattctgaacttggaggataatgtacagtcatggaaacctggagataccctggtcattgccagtactgattactccatgtaccaggcagaagagttccaggtgcttccctgcagatcctgcgcccccaaccaggtcaaagtggcagggaaaccaatgtacctgcacatcggggaggagatagacggcgtggacatgcgggcggaggttgggcttctgagccggaacatcatagtgatgggggagatggaggacaaatgctacccctacagaaaccacatctgcaatttctttgacttcgatacctttgggggccacatcaagtttgctctgggatttaaggcagcacacttggagggcacggagctgaagcatatgggacagcagctggtgggtcagtacccgattcacttccacctggccggtgatgtagacgaaaggggaggttatgacccacccacatacatcagggacctctccatccatcatacattctctcgctgcgtcacagtccatggctccaatggcttgttgatcaaggacgttgtgggctataactctttgggccactgcttcttcacggaagatgggccggaggaacgcaacacttttgaccactgtcttggcctccttgtcaagtctggaaccctcctcccctcggaccgtgacagcaagatgtgcaagatgatcacagaggactcctacccggggtacatccccaagcccaggcaagactgcaatgctgtgtccaccttctggatggccaatcccaacaacaacctcatcaactgtgccgctgcaggatctgaggaaactggattttggtttatttttcaccacgtaccaacgggcccctccgtgggaatgtactccccaggttattcagagcacattccactgggaaaattctataacaaccgagcacattccaactaccgggctggcatgatcatagacaacggagtcaaaaccaccgaggcctctgccaaggacaagcggccgttcctctcaatcatctctgccagatacagccctcaccaggacgccgacccgctgaagccccgggagccggccatcatcagacacttcattgcctacaagaaccaggaccacggggcctggctgcgcggcggggatgtgtggctggacagctgccggtttgctgacaatggcattggcctgaccctggccagtggtggaaccttcccgtatgacgacggctccaagcaagagataaagaacagcttgtttgttggcgagagtggcaacgtggggacggaaatgatggacaataggatctggggccctggcggcttggaccatagcggaaggaccctccctataggccagaattttccaattagaggaattcagttatatgatggccccatcaacatccaaaactgcactttccgaaagtttgtggccctggagggccggcacaccagcgccctggccttccgcctgaataatgcctggcagagctgcccccataacaacgtgaccggcattgcctttgaggacgttccgattacttccagagtgttcttcggagagcctgggccctggttcaaccagctggacatggatggggataagacatctgtgttccatgacgtcgacggctccgtgtccgagtaccctggctcctacctcacgaagaatgacaactggctggtccggcacccagactgcatcaatgttcccgactggagaggggccatttgcagtgggtgctatgcacagatgtacattcaagcctacaagaccagtaacctgcgaatgaagatcatcaagaatgacttccccagccaccctctttacctggagggggcgctcaccaggagcacccattaccagcaataccaaccggttgtcaccctgcagaagggctacaccatccactgggaccagacggcccccgccgaactcgccatctggctcatcaacttcaacaagggcgactggatccgagtggggctctgctacccgcgaggcaccacattctccatcctctcggatgttcacaatcgcctgctgaagcaaacgtccaagacgggcgtcttcgtgaggaccttgcagatggacaaagtggagcagagctaccctggcaggagccactactactgggacgaggactcagggctgttgttcctgaagctgaaagctcagaacgagagagagaagtttgctttctgctccatgaaaggctgtgagaggataaagattaaagctctgattccaaagaacgcaggcgtcagtgactgcacagccacagcttaccccaagttcaccgagagggctgtcgtagacgtgccgatgcccaagaagctctttggttctcagctgaaaacaaaggaccatttcttggaggtgaagatggagagttccaagcagcacttcttccacctctggaacgacttcgcttacattgaagtggatgggaagaagtaccccagttcggaggatggcatccaggtggtggtgattgacgggaaccaagggcgcgtggtgagccacacgagcttcaggaactccattctgcaaggcataccatggcagcttttcaactatgtggcgaccatccctgacaattccatagtgcttatggcatcaaagggaagatacgtctccagaggcccatggaccagagtgctggaaaagcttggggcagacaggggtctcaagttgaaagagcaaatggcattcgttggcttcaaaggcagcttccggcccatctgggtgacactggacactgaggatcacaaagccaaaatcttccaagttgtgcccatccctgtggtgaagaagaagaagttgtgaggacagctgccgcccggtgccacctcgtggtagactatgacggtgactcttggcagcagaccagtgggggatggctgggtcccccagcccctgccagcagctgcctgggaaggccgtgtttcagccctgatgggccaagggaaggctatcagagaccctggtgctgccacctgcccctactcaagtgtctacctggagcccctggggcggtgctggccaatgctggaaacattcactttcctgcagcctcttgggtgcttctctcctatctgtgcctcttcagtgggggtttggggaccatatcaggagacctgggttgtgctgacagcaaagatccactttggcaggagccctgacccagctaggaggtagtctggagggctggtcattcacagatccccatggtcttcagcagacaagtgagggtggtaaatgtaggagaaagagccttggccttaaggaaatctttactcctgtaagcaagagccaacctcacaggattaggagctggggtagaactggctatccttggggaagaggcaagccctgcctctggccgtgtccacctttcaggagactttgagtggcaggtttggacttggactagatgactctcaaaggcccttttagttctgagattccagaaatctgctgcatttcacatggtacctggaacccaacagttcatggatatccactgatatccatgatgctgggtgccccagcgcacacgggatggagaggtgagaactaatgcctagcttgaggggtctgcagtccagtagggcaggcagtcaggtccatgtgcactgcaatgccaggtggagaaatcacagagaggtaaaatggaggccagtgccatttcagaggggaggctcaggaaggcttcttgcttacaggaatgaaggctgggggcattttgctggggggagatgaggcagcctctggaatggctcagggattcagccctccctgccgctgcctgctgaagctggtgactacggggtcgccctttgctcacgtctctctggcccactcatgatggagaagtgtggtcagaggggagcaatgggctttgctgcttatgagcacagaggaattcagtccccaggcagccctgcctctgactccaagagggtgaagtccacagaagtgagctcctgccttagggcctcatttgctcttcatccagggaactgagcacagggggcctccaggagaccctagatgtgctcgtactccctcggcctgggatttcagagctggaaatatagaaaatatctagcccaaagccttcattttaacagatggggaaagtgagcccccaagatgggaaagaaccacacagctaagggagggcctggggagccccaccctagcccttgctgccacaccacattgcctcaacaaccggccccagagtgcccaggcactcctgaggtagcttctggaaatggggacaagtcccctcgaaggaaaggaaatgactagagtagaatgacagctagcagatctcttccctcctgctcccagcgcacacaaacccgccctccccttggtgttggcggtccctgtggccttcactttgttcactacctgtcagcccagcctgggtgcacagtagctgcaactccccattggtgctacctggctctcctgtctctgcagctctacaggtgaggcccagcagagggagtagggctcgccatgtttctggtgagccaatttggctgatcttgggtgtctgaacagctattgggtccaccccagtccctttcagctgctgcttaatgccctgctctctccctggcccaccttatagagagcccaaagagctcctgtaagagggagaactctatctgtggtttataatcttgcacgaggcaccagagtctccctgggtcttgtgatgaactacatttatcccctttcctgccccaaccacaaactctttccttcaaagagggcctgcctggctccctccacccaactgcacccatgagactcggtccaagagtccattccccaggtgggagccaactgtcagggaggtctttcccaccaaacatctttcagctgctgggaggtgaccatagggctctgcttttaaagatatggctgcttcaaaggccagagtcacaggaaggacttcttccagggagattagtggtgatggagaggagagttaaaatgacctcatgtccttcttgtccacggttttgttgagttttcactcttctaatgcaagggtctcacactgtgaaccacttaggatgtgatcactttcaggtggccaggaatgttgaatgtctttggctcagttcatttaaaaaagatatctatttgaaagttctcagagttgtacatatgtttcacagtacaggatctgtacataaaagtttctttcctaaaccattcaccaagagccaatatctaggcattttcttggtagcacaaattttcttattgcttagaaaattgtcctccttgttatttctgtttgtaagacttaagtgagttaggtctttaaggaaagcaacgctcctctgaaatgcttgtcttttttctgttgccgaaatagctggtcctttttcgggagttagatgtatagagtgtttgtatgtaaacatttcttgtaggcatcaccatgaacaaagatatattttctatttatttattatatgtgcacttcaagaagtcactgtcagagaaataaagaattgtcttaaatgtc

SEQ ID NO: 187 - DNA, 4553 bp, Homo sapiens
gagccaggcgggggcggagggggaggctggcagcggagctttgaatagggaagttttgcaggggttacgtttgcagtcagtccggtgtttgcaaatattgtgtgggctccgcgcgctgcgggctgcgggagggtccggccgggcgtctctgcgagcctggagtttgcatgaaactttcacctgcgctccggggagactttcggctccggctcccaccgcgcgcctcgccgccctcgcgaccgcgggctccgtccaacccggcccgacatggacgtgctccccatgtgcagcatcttccaggagctccagatcgtgcacgagaccggctacttctcggcgctgccgtctctggaggagtactggcaacagacctgcctagagctggaacgttacctccagagcgagccctgctatgtttcagcctcagaaatcaaatttgacagccaggaagatctgtggaccaaaatcattctggctcgggagaaaaaggaggaatccgaactgaagatatcttccagtcctccagaggacactctcatcagcccgagcttttgttacaacttagagaccaacagcctgaactcagatgtcagcagcgaatcctctgacagctccgaggaactttctcccacggccaagtttacctccgaccccattggcgaagttttggtcagctcgggaaaattgagctcctctgtcacctccacgcctccatcttctccggaactgagcagggaaccttctcaactgtggggttgcgtgcccggggagctgccctcgccagggaaggtgcgcagcgggacttcggggaagccaggagaaaagccttacagatgctcatgggaagggtgtgagtggcgttttgcaagaagtgatgagttaaccaggcacttccgaaagcacaccggggccaagccttttaaatgctcccactgtgacaggtgtttttccaggtctgaccacctggccctgcacatgaagaggcacctctgagggagcagagaggtggatcctgtaggctaaaaggcttccaggctgagagccggccgtggaaggagggatgcgtgttccagccaaagcatgccgttctgcaccctacccagttgcctccagggcctctccttggaaggtcttttgagggctaaaaaggtcctgtaagaagcggcatagcacccgtggtgcatggtatgtgggtgaccctggactcgccactggtacccgcccttccgagcggcgcctaagcctttgccgtgagcatgcacactgagaatgctaatggttgggttgattgtatgttgaggatctattactgaccgtatgatgaggccaactttttttccttgtggttagcaagactgcaagagatggaaaaaaagtagtttgaatgttttgtgtgtaaggagtataccatgagatgagatgaccaccaatcatttccttggggggagggggtgtctgcaccttagaaaaaaaaagaaaaatcaaaaaaacaaaaaaacaaaaacaaaaaaagaaggaaaatcttggagggtgggcgtgggaactcaggaccccagagtggcgagtggtgtggggagggagagcctctctcccccttttctgtgtgagaggaactcttagtgtctggtgcagctattaaatgtgcaatgtgtcaagtagcttgttttacacgctacaacatagctcatttgtaacccattgtataagctgtgtatttacaaatataacacaacaatttaacttttccttagaatacaaaaagtcatgcatggtctggggaactatatgcttttccatttttaagtcaggactgcaatactgattccagttaatgagcagctaagatccaatctgtctaatacagtgaccccctagccatccgggcctggcaatatacaattttttttcccctccaagtttgtaacactccccttccagaaaggcattgtgcaacacaggattatttttaaatgattctgaatttgaattaactttttggagaattctgtgatgcccttagaagaaattggacacgtattgagtgtcacaaagctggggctgggaattgctggtctaatgtttcattagacttaagaacctaaaatttttctcagttgggtggataaaaccactaacgcttagaaactgttttctcatgcagctatgtttctcttatttatgccttgaggactaatttctggttttctagctgttaatgcactgttgaccttcataatggtgccttacgcaagcgatcccttctgtgggggtctcatacaggggtgtgggcgatgcatgctttattaaggctcttgtttcacctggcagtgtactgtatcaacgtataatacagaaaaaaaatctctttaaggtcctccttcacaaagacatagagtgaaactccctttacatgtcagtatttgttcaacactttaggcaacttgactgtcagtgttaaaatggaaaacaggaaaatggaaaaatctgaccaattctgccaccttgagactttcatatagaccttgcacaacaattgtatagatcacacaccggctgtatttaatatgtaacattttcacacatattaaagatacagaagtattaaaaaacccccaatgttaatgtatttgcttaaaaggcacaagtttcacatatctgtctagctatctgttggtaatacagaaagtatactacttttttaaaaaagtgggcagaattcttgtgtatgtatatttgtgtgtacagtatgtgtatgtgtgtatatatatatattatatatatagataatatataaatattttttttaaggagaaactagaatgtttagctagaaaattccacagcctgtgaagaaatatttcaaaatggccataaaggaggtaaaaatgaaaaccataacctaacttttatagaggctttatctttaatttaacgatgtgcggaggactttcttgcttgaatctgttccgggctgtctgctctgtccatcaaatgggcaggtctggaatggggcaccttcggccgttcagaagtggcctgaacagaatgctggaacccaggctggactcggacacactaaggttttgattttgaatttcagccttattagaagatctaacctaagagtaagctaaccacagggattcttttgtagaacactttttatgcagatgaagctattttttccagcaagtagattcttccagtttttccaaggagtaatttccccgaattggcataccacggcgtggacagctgatatttcacccagctgctggcttgtgggtgtggctctttgctttatatatatatacacacatgtgagtctggctgggctggtattttgtttgatcttcctggaaatgagcagtgactaacgctcacataactggttttttttttatctgggctgatgaatacatttacctaagaaactcatttcgttttacttaagaggggaagtgcagttttcttttggcagttcagaatccaagcacttgatttgctgggtttggaaaactccttttttggccttctatgtgcttagccataacaattccattaagcaagaaggtaagcaaaagacaaaaaaaaaaaaaggaaaaaaaaaaacttgcactggcttgtctcacttacgaaacatgtcggagctgtttgcctgggtggggctgggtaccgtacctgtcaatgcctgtgattttcataattagcacgtacataaagaagtacattctgttcaggtgataactgagcctcaatcaagcagaaactttttgcttgaaattaaaaaaaaatttctattagtgaaatttcttttttttttttttttggaagcaccctgttatctaaagaatctttgtaagatttttgtaaaattttgttttacaagattttatttgaaattgttttttgcaagattgttatatttctgtatgaatgtattttttattggaataacataaaagaattcttatcagcatcttgagtctggttgttttttttgggggaagggggttgttggaacagattcctcctgcattcatcaccctggcttcctcctgggggcaaatcttcattgagcaaccctgagaacaactcaccgacctcagccccttcctctttccacagcctgtcctgggagctggagaggatgtcagcgagcctgacattgccctccctgaatgcatcaaatactcttctccaaggactgacaaaaacaaccccccggctgtgggcacagtagggaaccatgccggtttgatcttccattgctcaagccagggaatgcattgcagaggcacctgcacaacgacaaacttgagtgtttccctgccacttctgtgcctccacagcctgctccagttccgcagctagagctgggcctaccttccccagccagccctgccacacacctggctgaggcatgtctgggaggggtggaggaggcagagggactccaggccagagggctgttctcacaacctcagcccactctcagtcaaggagggcagaaaataaaagatgacatcactgccaaaaaaaaaaaaaaaaaa

SEQ ID NO: 188 - DNA, 2880 bp, Homo sapiens
tgctgctctccgcccgcgtccggctcgtggccccctacttcgggcaccatggacacctcccggctcggtgtgctcctgtccttgcctgtgctgctgcagctggcgaccgggggcagctctcccaggtctggtgtgttgctgaggggctgccccacacactgtcattgcgagcccgacggcaggatgttgctcagggtggactgctccgacctggggctctcggagctgccttccaacctcagcgtcttcacctcctacctagacctcagtatgaacaacatcagtcagctgctcccgaatcccctgcccagtctccgcttcctggaggagttacgtcttgcgggaaacgctctgacatacattcccaagggagcattcactggcctttacagtcttaaagttcttatgctgcagaataatcagctaagacacgtacccacagaagctctgcagaatttgcgaagccttcaatccctgcgtctggatgctaaccacatcagctatgtgcccccaagctgtttcagtggcctgcattccctgaggcacctgtggctggatgacaatgcgttaacagaaatccccgtccaggcttttagaagtttatcggcattgcaagccatgaccttggccctgaacaaaatacaccacataccagactatgcctttggaaacctctccagcttggtagttctacatctccataacaatagaatccactccctgggaaagaaatgctttgatgggctccacagcctagagactttagatttaaattacaataaccttgatgaattccccactgcaattaggacactctccaaccttaaagaactaggatttcatagcaacaatatcaggtcgatacctgagaaagcatttgtaggcaacccttctcttattacaatacatttctatgacaatcccatccaatttgttgggagatctgcttttcaacatttacctgaactaagaacactgactctgaatggtgcctcacaaataactgaatttcctgatttaactggaactgcaaacctggagagtctgactttaactggagcacagatctcatctcttcctcaaaccgtctgcaatcagttacctaatctccaagtgctagatctgtcttacaacctattagaagatttacccagtttttcagtctgccaaaagcttcagaaaattgacctaagacataatgaaatctacgaaattaaagttgacactttccagcagttgcttagcctccgatcgctgaatttggcttggaacaaaattgctattattcaccccaatgcattttccactttgccatccctaataaagctggacctatcgtccaacctcctgtcgtcttttcctataactgggttacatggtttaactcacttaaaattaacaggaaatcatgccttacagagcttgatatcatctgaaaactttccagaactcaaggttatagaaatgccttatgcttaccagtgctgtgcatttggagtgtgtgagaatgcctataagatttctaatcaatggaataaaggtgacaacagcagtatggacgaccttcataagaaagatgctggaatgtttcaggctcaagatgaacgtgaccttgaagatttcctgcttgactttgaggaagacctgaaagcccttcattcagtgcagtgttcaccttccccaggccccttcaaaccctgtgaacacctgcttgatggctggctgatcagaattggagtgtggaccatagcagttctggcacttacttgtaatgctttggtgacttcaacagttttcagatcccctctgtacatttcccccattaaactgttaattggggtcatcgcagcagtgaacatgctcacgggagtctccagtgccgtgctggctggtgtggatgcgttcacttttggcagctttgcacgacatggtgcctggtgggagaatggggttggttgccatgtcattggttttttgtccatttttgcttcagaatcatctgttttcctgcttactctggcagccctggagcgtgggttctctgtgaaatattctgcaaaatttgaaacgaaagctccattttctagcctgaaagtaatcattttgctctgtgccctgctggccttgaccatggccgcagttcccctgctgggtggcagcaagtatggcgcctcccctctctgcctgcctttgccttttggggagcccagcaccatgggctacatggtcgctctcatcttgctcaattccctttgcttcctcatgatgaccattgcctacaccaagctctactgcaatttggacaagggagacctggagaatatttgggactgctctatggtaaaacacattgccctgttgctcttcaccaactgcatcctaaactgccctgtggctttcttgtccttctcctctttaataaaccttacatttatcagtcctgaagtaattaagtttatccttctggtggtagtcccacttcctgcatgtctcaatccccttctctacatcttgttcaatcctcactttaaggaggatctggtgagcctgagaaagcaaacctacgtctggacaagatcaaaacacccaagcttgatgtcaattaactctgatgatgtcgaaaaacagtcctgtgactcaactcaagccttggtaacctttaccagctccagcatcacttatgacctgcctcccagttccgtgccatcaccagcttatccagtgactgagagctgccatctttcctctgtggcatttgtcccatgtctctaattaatatgtgaaggaaaatgttttcaaaggttgagaacctgaaaatgtgagattgagtatatcagagcagtaattaataagaagagctgaggtgaaactcggtttaaa

SEQ ID NO: 189 - DNA, 2379 bp, Homo sapiens; identical to SEQ ID NO: 44

SEQ ID NO: 190 - DNA, 4573 bp, Homo sapiens
agaacaccaattacaaaccacaggcttcctgctctagggagttgatccagaattgtctttctgaaaggaagcactcggaatccttccgaactttccaagtccatccatgattcagagatactgccttctctctctctgggattttatgtgtttctgatagtgaattgttgatgtatttgctactttgcttcttttctctttcaagacttgatcattttatatgctgtttggagaaaaaaagaacttttgttagcaaggaggtttcagaaatgattttggattttctgtaagtgtttaatttagttctaggggacagcatctctcatcccggagtaaatttctgcctttgacctgcatggattattttttcaggctgcggaatttctcggcacctacctgtagtatggggcacttggtttggttgcagagtaagaaggtggaagaatgagctgtacttggttaagcagttgaaaccttttttgagcaggatctgtaaaagcataattgaatttgtttcacccccgtggattccagtgggcccgacagcgcaacagtgcctggcaacttgatgcatatggaagagcaatgccaagtgatctgacataatacaaattcacgaagtgacattcaatcacaagcaaagttggaaattccaaagagaagtggtgagatctttactagtcacagtgaagatgggagaaaatgacatacctgcagcagatgtgggctgaaaatatcctcttctctgcccaatcaggaatgctacctgtttttgggaataaactttagagaaaggaagggccaaaactacgacttggctttctgaaacggaagcataaatgttcttttcctccatttgtctggatctgagaacctgcatttggtattagctagtggaagcagtatgtatggttgaagtgcattgctgcagctggtagcatgagtggtggccaccagctgcagctggctgccctctggccctggctgctgatggctaccctgcaggcaggctttggacgcacaggactggtactggcagcagcggtggagtctgaaagatcagcagaacagaaagctattatcagagtgatccccttgaaaatggaccccacaggaaaactgaatctcactttggaaggtgtgtttgctggtgttgctgaaataactccagcagaaggaaaattaatgcagtcccacccgctgtacctgtgcaatgccagtgatgacgacaatctggagcctggattcatcagcatcgtcaagctggagagtcctcgacgggccccccgcccctgcctgtcactggctagcaaggctcggatggcgggtgagcgaggagccagtgctgtcctctttgacatcactgaggatcgagctgctgctgagcagctgcagcagccgctggggctgacctggccagtggtgttgatctggggtaatgacgctgagaagctgatggagtttgtgtacaagaaccaaaaggcccatgtgaggattgagctgaaggagcccccggcctggccagattatgatgtgtggatcctaatgacagtggtgggcaccatctttgtgatcatcctggcttcggtgctgcgcatccggtgccgcccccgccacagcaggccggatccgcttcagcagagaacagcctgggccatcagccagctggccaccaggaggtaccaggccagctgcaggcaggcccggggtgagtggccagactcagggagcagctgcagctcagcccctgtgtgtgccatctgtctggaggagttctctgaggggcaggagctacgggtcatttcctgcctccatgagttccatcgtaactgtgtggacccctggttacatcagcatcggacttgccccctctgcatgttcaacatcacagagggagattcattttcccagtccctgggaccctctcgatcttaccaagaaccaggtcgaagactccacctcattcgccagcatcccggccatgcccactaccacctccctgctgcctacctgttgggcccttcccggagtgcagtggctcggcccccacgacctggtcccttcctgccatcccaggagccaggcatgggccctcggcatcaccgcttccccagagctgcacatccccgggctccaggagagcagcagcgcctggcaggagcccagcacccctatgcacaaggctggggactgagccacctccaatccacctcacagcaccctgctgcttgcccagtgcccctacgccgggccaggccccctgacagcagtggatctggagaaagctattgcacagaacgcagtgggtacctggcagatgggccagccagtgactccagctcagggccctgtcatggctcttccagtgactctgtggtcaactgcacggacatcagcctacagggggtccatggcagcagttctactttctgcagctccctaagcagtgactttgaccccctagtgtactgcagccctaaaggggatccccagcgagtggacatgcagcctagtgtgacctctcggcctcgttccttggactcggtggtgcccacaggggaaacccaggtttccagccatgtccactaccaccgccaccggcaccaccactacaaaaagcggttccagtggcatggcaggaagcctggcccagaaaccggagtcccccagtccaggcctcctattcctcggacacagccccagccagagccaccttctcctgatcagcaagtcaccagatccaactcagcagccccttcggggcggctctctaacccacagtgccccagggccctccctgagccagcccctggcccagttgacgcctccagcatctgccccagtaccagcagtctgttcaacttgcaaaaatccagcctctctgcccgacacccacagaggaaaaggcgggggggtccctccgagcccacccctggctctcggccccaggatgcaactgtgcacccagcttgccagatttttccccattacacccccagtgtggcatatccttggtccccagaggcacaccccttgatctgtggacctccaggcctggacaagaggctgctaccagaaaccccaggcccctgttactcaaattcacagccagtgtggttgtgcctgactcctcgccagcccctggaaccacatccacctggggaggggccttctgaatggagttctgacaccgcagagggcaggccatgcccttatccgcactgccaggtgctgtcggcccagcctggctcagaggaggaactcgaggagctgtgtgaacaggctgtgtgagatgttcaggcctagctccaaccaagagtgtgctccagatgtgtttgggccctacctggcacagagtcctgctcctgggaaaggaaaggaccacagcaaacaccattctttttgccgtacttcctagaagcactggaagaggactggtgatggtggagggtgagagggtgccgtttcctgctccagctccagaccttgtctgcagaaaacatctgcagtgcagcaaatccatgtccagccaggcaaccagctgctgcctgtggcgtgtgtgggctggatcccttgaaggctgagtttttgagggcagaaagctagctatgggtagccaggtgttacaaaggtgctgctccttctccaacccctacttggtttccctcaccccaagcctcatgttcataccagccagtgggttcagcagaacgcatgacaccttatcacctccctccttgggtgagctctgaacaccagctttggcccctccacagtaaggctgctacatcaggggcaaccctggctctatcattttccttttttgccaaaaggaccagtagcataggtgagccctgagcactaaaaggaggggtccctgaagctttcccactatagtgtggagttctgtccctgaggtgggtacagcagccttggttcctctgggggttgagaataagaatagtggggagggaaaaactcctccttgaagatttcctgtctcagagtcccagagaggtagaaaggaggaatttctgctggactttatctgggcagaggaaggatggaatgaaggtagaaaaggcagaattacagctgagcggggacaacaaagagttcttctctgggaaaagttttgtcttagagcaaggatggaaaatggggacaacaaaggaaaagcaaagtgtgacccttgggtttggacagcccagaggcccagctccccagtataagccatacaggccagggacccacaggagagtggattagagcacaagtctggcctcactgagtggacaagagctgatgggcctcatcagggtgacattcaccccagggcagcctgaccactcttggcccctcaggcattatcccatttggaatgtgaatgtggtggcaaagtgggcagaggaccccacctgggaacctttttccctcagttagtggggagactagcacctaggtacccacatgggtatttatatctgaaccagacagacgcttgaatcaggcactatgttaagaaatatatttatttgctaatatatttatccacaaaaaaaaaaaaaaaaaa

SEQ ID NO: 191 - DNA, 3963 bp, Homo sapiens
ggagagccgaaagcggagctcgaaactgactggaaacttcagtggcgcggagactcgccagtttcaaccccggaaacttttctttgcaggaggagaagagaaggggtgcaagcgcccccacttttgctctttttcctcccctcctcctcctctccaattcgcctccccccacttggagcgggcagctgtgaactggccaccccgcgccttcctaagtgctcgccgcggtagccggccgacgcgccagcttccccgggagccgcttgctccgcatccgggcagccgaggggagaggagcccgcgcctcgagtccccgagccgccgcggcttctcgcctttcccggccaccagccccctgccccgggcccgcgtatgaatctcctggaccccttcatgaagatgaccgacgagcaggagaagggcctgtccggcgcccccagccccaccatgtccgaggactccgcgggctcgccctgcccgtcgggctccggctcggacaccgagaacacgcggccccaggagaacacgttccccaagggcgagcccgatctgaagaaggagagcgaggaggacaagttccccgtgtgcatccgcgaggcggtcagccaggtgctcaaaggctacgactggacgctggtgcccatgccggtgcgcgtcaacggctccagcaagaacaagccgcacgtcaagcggcccatgaacgccttcatggtgtgggcgcaggcggcgcgcaggaagctcgcggaccagtacccgcacttgcacaacgccgagctcagcaagacgctgggcaagctctggagacttctgaacgagagcgagaagcggcccttcgtggaggaggcggagcggctgcgcgtgcagcacaagaaggaccacccggattacaagtaccagccgcggcggaggaagtcggtgaagaacgggcaggcggaggcagaggaggccacggagcagacgcacatctcccccaacgccatcttcaaggcgctgcaggccgactcgccacactcctcctccggcatgagcgaggtgcactcccccggcgagcactcggggcaatcccagggcccaccgaccccacccaccacccccaaaaccgacgtgcagccgggcaaggctgacctgaagcgagaggggcgccccttgccagaggggggcagacagccccctatcgacttccgcgacgtggacatcggcgagctgagcagcgacgtcatctccaacatcgagaccttcgatgtcaacgagtttgaccagtacctgccgcccaacggccacccgggggtgccggccacgcacggccaggtcacctacacgggcagctacggcatcagcagcaccgcggccaccccggcgagcgcgggccacgtgtggatgtccaagcagcaggcgccgccgccacccccgcagcagcccccacaggccccgccggccccgcaggcgcccccgcagccgcaggcggcgcccccacagcagccggcggcacccccgcagcagccacaggcgcacacgctgaccacgctgagcagcgagccgggccagtcccagcgaacgcacatcaagacggagcagctgagccccagccactacagcgagcagcagcagcactcgccccaacagatcgcctacagccccttcaacctcccacactacagcccctcctacccgcccatcacccgctcacagtacgactacaccgaccaccagaactccagctcctactacagccacgcggcaggccagggcaccggcctctactccaccttcacctacatgaaccccgctcagcgccccatgtacacccccatcgccgacacctctggggtcccttccatcccgcagacccacagcccccagcactgggaacaacccgtctacacacagctcactcgaccttgaggaggcctcccacgaagggcgaagatggccgagatgatcctaaaaataaccgaagaaagagaggaccaaccagaattccctttggacatttgtgtttttttgtttttttattttgttttgttttttcttcttcttcttcttccttaaagacatttaagctaaaggcaactcgtacccaaatttccaagacacaaacatgacctatccaagcgcattacccacttgtggccaatcagtggccaggccaaccttggctaaatggagcagcgaaatcaacgagaaactggactttttaaaccctcttcagagcaagcgtggaggatgatggagaatcgtgtgatcagtgtgctaaatctctctgcctgtttggactttgtaattatttttttagcagtaattaaagaaaaaagtcctctgtgaggaatattctctattttaaatatttttagtatgtactgtgtatgattcattaccattttgaggggatttatacatatttttagataaaattaaatgctcttatttttccaacagctaaactactcttagttgaacagtgtgccctagcttttcttgcaaccagagtatttttgtacagatttgctttctcttacaaaaagaaaaaaaaaatcctgttgtattaacatttaaaaacagaattgtgttatgtgatcagttttgggggttaactttgcttaattcctcaggctttgcgatttaaggaggagctgccttaaaaaaaaataaaggccttattttgcaattatgggagtaaacaatagtctagagaagcatttggtaagctttatcatatatatattttttaaagaagagaaaaacaccttgagccttaaaacggtgctgctgggaaacatttgcactcttttagtgcatttcctcctgcctttgcttgttcactgcagtcttaagaaagaggtaaaaggcaagcaaaggagatgaaatctgttctgggaatgtttcagcagccaataagtgcccgagcacactgcccccggttgcctgcctgggccccatgtggaaggcagatgcctgctcgctctgtcacctgtgcctctcagaacaccagcagttaaccttcaagacattccacttgctaaaattatttattttgtaaggagaggttttaattaaaacaaaaaaaaattcttttttttttttttttccaattttaccttctttaaaataggttgttggagctttcctcaaagggtatggtcatctgttgttaaattatgttcttaactgtaaccagtttttttttatttatctctttaatctttttttattattaaaagcaagtttctttgtattcctcaccctagatttgtataaatgcctttttgtccatcccttttttctttgttgtttttgttgaaaacaaactggaaacttgtttctttttttgtataaatgagagattgcaaatgtagtgtatcactgagtcatttgcagtgttttctgccacagacctttgggctgccttatattgtgtgtgtgtgtgggtgtgtgtgtgttttgacacaaaaacaatgcaagcatgtgtcatccatatttctctgcatcttctcttggagtgagggaggctacctggaggggatcagcccactgacagaccttaatcttaattactgctgtggctagagagtttgaggattgctttttaaaaaagacagcaaacttttttttttatttaaaaaaagatatattaacagttttagaagtcagtagaataaaatcttaaagcactcataatatggcatccttcaatttctgtataaaagcagatctttttaaaaagatacttctgtaacttaagaaacctggcatttaaatcatattttgtctttaggtaaaagctttggtttgtgttcgtgttttgtttgtttcacttgtttccctcccagccccaaaccttttgttctctccgtgaaacttacctttccctttttctttctcttttttttttttgtatattattgtttacaataaatatacattgcattaaaaagaaaaaaaaaaaaaaaaaaaaaaaaaaaaaaa

SEQ ID NO: 192 - DNA, 1963 bp, Homo sapiens
cggggcgagcgagcggggcgcggcgaggggcaagggcggggagggccccggcgctcagagcaggcgccagggaggcaggctgggcggcccttcgtcctcgccttcgggtgtccatgcctcggcggcggcgtcccgctccgcagccaggggcctgcaagccgtagccatggccgcggtggccgtcctccggaacgactcgctgcaggcctttctccaggaccgcacccccagcgcctccccggacctgggcaagcactcgcccctggcattgctggccgccacctgtagccgcatcggccagccgggcgcggcggcgcccccggacttcctgcaggtgccctacgaccccgcgctgggctcaccctccaggctcttccacccgtggaccgccgacatgccggcgcactcgccaggcgcactgccgcccccgcatcccagcttggggctgacgccgcagaagacgcacctgcagccgtccttcggggctgcgcacgagcttccccttacaccccccgccgacccctcgtacccctacgagttctcgccggtcaagatgctgccctcgagcatggcggctctgcccgccagctgcgcgcccgcctacgtgccctacgcggcgcaggccgcgctgccgccaggctactccaacctgctgcctccgccgccgccaccgcccccgccgcccacctgccgccagttgtcacccaacccggcccccgacgacctcccgtggtggagcatcccgcaggcgggcgccgggccgggggcctccggggttccgggaagcggcctctccggcgcctgtgccggggccccccacgcgccccgcttccccgcctctgcggccgctgctgctgcggccgccgccgccctacaaagaggcctggtgttgggcccgtcggactttgcgcagtaccagagccagatcgccgcgctgctgcagaccaaggcccccctggcggccacggccaggaggtgccgccgctgccgctgtcccaactgccaggcggcgggcggcgcccccgaggcggagccggggaagaagaagcagcacgtgtgccacgtgccgggctgcggcaaggtgtacgggaagacgtcgcacctgaaggcgcacctgcgctggcacacgggcgagcgacccttcgtgtgcaactggctcttctgcgggaagagcttcacgcgctcggacgagctgcagcggcacctgcggactcacacgggcgagaagcgctttgcctgtcccgagtgcggcaagcgcttcatgcgcagcgaccacctcgcgaagcacgtcaagactcaccagaataagaagctcaaagtcgctgaggccggggttaagcgggaggacgcgcgggacctgtgagccctcccggaggtggacccccttcccagcacctctgcgagagatccggggacctgtgggcagctggcggaggggagactcagcagacggaccctctccgttgcctgcctcccaaaatggagccaggcttccaacttccgctgccttcggacatagggacccagttcccaggagcggggaggtagggttggggctggggcatttggattgtaattgggagctctgccgtacgccagggcggttccaaactctaaaccgttcccaccgtcagggagacctacagtttcgggggaccaccctggtctggccttgtatataggaaatgctgctgaactgaatagaaaggaacttgggagatttgaaacagtgctcgggttttcgctaggaccggtttgggctttgtacaggttatttaatagctttgttaaagataattataataattataacattaataaaaatgttgcttttgtcttcagctccatgcagagctacagcatgatatgtctctgtaaagtgatcagcagttgcagcgtgaaaataaatactttaactcaggggtcactacaggaagaccccgttgaaaaaaaaaaaaaaaaa

SEQ ID NO: 193 - DNA, 4814 bp, Homo sapiens
gaattctagaggcggcggagggtggcgaggagctctcgctttctctcgctccctccctctccgactccgtctctctctctctctctctctctcccctccctctctttccctctgttccattttttccccctctaaatcctccctgccctgcgcgcctggacacagatttaggaagcgaattcgctcacgttttaggacaaggaagagagagaggcacgggagaagagcccagcaagatttggattgaaaccgagacaccctccggaggctcggagcagaggaaggaggaggagggcggcgaacggaagccagtttgcaattcaagttttgatagcgctggtagaagggggtttaaatcagatttttttttttttaaaggagagagactttttccgctctctcgctccctgttaaagccgggtctagcacagctgcagacgccaccagcgagaaagagggagaggaagacagatagggggcgggggaagaagaaaaagaaaggtaaaaagtcttctaggagaacctttcacatttgcaacaaaagacctaggggctggagagagattcctgggacgcagggctggagtgtctatttcgagctcagcggcagggctcgggcgcgagtcgagaccctgctcgctcctctcgcttctgaaaccgacgttcaggagcggctttttaaaaacgcaaggcacaaggacggtcacccgcgcgactatgtttgctgatttttcgccttgccctctttaaaagcggcctcccattctccaaaagacacttcccctcctccctttgaagtgcattagttgtgatttctgcctccttttcttttttctttcttttttgttttgctttttccccccttttgaattatgtgctgctgttaaacaacaacaaaaaaacaacaaaacacagcagctgcggacttgtccccggctggagcccagcgccccgcctggagtggatgagcctctccatgagagatccggtcattcctgggacaagcatggcctaccatccgttcctacctcaccgggcgccggacttcgccatgagcgcggtgctgggtcaccagccgccgttcttccccgcgctgacgctgcctcccaacggcgcggcggcgctctcgctgccgggcgccctggccaagccgatcatggatcaattggtgggggcggccgagaccggcatcccgttctcctccctggggccccaggcgcatctgaggcctttgaagaccatggagcccgaagaagaggtggaggacgaccccaaggtgcacctggaggctaaagaactttgggatcagtttcacaagcggggcaccgagatggtcattaccaagtcgggaaggcgaatgtttcctccatttaaagtgagatgttctgggctggataaaaaagccaaatacattttattgatggacattatagctgctgatgactgtcgttataaatttcacaattctcggtggatggtggctggtaaggccgaccccgaaatgccaaagaggatgtacattcacccggacagccccgctactggggaacagtggatgtccaaagtcgtcactttccacaaactgaaactcaccaacaacatttcagacaaacatggatttactttggccttcccaagtgatcacgctacgtggcaggggaattatagttttggtactcagactatattgaactccatgcacaaataccagccccggttccacattgtaagagccaatgacatcttgaaactcccttatagtacatttcggacatacttgttccccgaaactgaattcatcgctgtgactgcataccagaatgataagataacccagttaaaaatagacaacaacccttttgcaaaaggtttccgggacactggaaatggccgaagagaaaaaagaaaacagctcaccctgcagtccatgagggtgtttgatgaaagacacaaaaaggagaatgggacctctgatgagtcctccagtgaacaagcagctttcaactgcttcgcccaggcttcttctccagccgcctccactgtagggacatcgaacctcaaagatttatgtcccagcgagggtgagagcgacgccgaggccgagagcaaagaggagcatggccccgaggcctgcgacgcggccaagatctccaccaccacgtcggaggagccctgccgtgacaagggcagccccgcggtcaaggctcaccttttcgctgctgagcggccccgggacagcgggcggctggacaaagcgtcgcccgactcacgccatagccccgccaccatctcgtccagcactcgcggcctgggcgcggaggagcgcaggagcccggttcgcgagggcacagcgccggccaaggtggaagaggcgcgcgcgctcccgggcaaggaggccttcgcgccgctcacggtgcagacggacgcggccgccgcgcacctggcccagggccccctgcctggcctcggcttcgccccgggcctggcgggccaacagttcttcaacgggcacccgctcttcctgcaccccagccagtttgccatggggggcgccttctccagcatggcggccgctggcatgggtcccctcctggccacggtttctggggcctccaccggtgtctcgggcctggattccacggccatggcctctgccgctgcggcgcagggactgtccggggcgtccgcggccaccctgcccttccacctccagcagcacgtcctggcctctcagggcctggccatgtcccctttcggaagcctgttcccttacccctacacgtacatggccgcagcggcggccgcctcctctgcggcagcctccagctcggtgcaccgccaccccttcctcaatctgaacaccatgcgcccgcggctgcgctacagcccctactccatcccggtgccggtcccggacggcagcagtctgctcaccaccgccctgccctccatggcggcggccgcggggcccctggacggcaaagtcgccgccctggccgccagcccggcctcggtggcagtggactcgggctctgaactcaacagccgctcctccacgctctcctccagctccatgtccttgtcgcccaaactctgcgcggagaaagaggcggccaccagcgaactgcagagcatccagcggttggttagcggcttggaagccaagccggacaggtcccgcagcgcgtccccgtagacccgtcccagacacgtcttttcattccagtccagttcaggctgccgtgcactttgtcggatataaaataaaccacgggcccgccatggcgttagcccttccttttgcagttgcgtctgggaaggggccccggactccctcgagagaatgtgctagagacagcccctgtcttcttggcgtggtttatatgtccgggatctggatcagattctgggggctcagaaacgtcggttgcattgagctactgggggtaggagttccaacatttatgtccagagcaacttccagcaaggctggtctgggtctctgcccaccaggcggggaggtgttcaaagacatctccctcagtgcggatttatatatatatttttccttcactgtgtcaagtggaaacaaaaacaaaatctttcaaaaaaaaaatcgggacaagtgaacacattaacatgattctgtttgtgcagattaaaaactttatagggacttgcattatcggttctcaataaattactgagcagctttgtttggggagggaagtccctaccatccttgtttagtctatattaagaaaatctgtgtctttttaatattcttgtgatgttttcagagccgctgtaggtctcttcttgcatgtccacagtaatgtatttgtggtttttattttgaacgcttgcttttagagagaaaacaatatagccccctacccttttcccaatcctttgccctcaaatcagtgacccaagggagggggggatttaaagggaaggagtgggcaaaacacataaaatgaatttattatatctaagctctgtagcaggattcatgtcgttctttgacagttctttctctttcctgtatatgcaataacaaggttttaaaaaaataataaagaagtgagactattagacaaagtatttatgtaattatttgataactcttgtaaataggtggaatatgaatgcttggaaaattaaactttaatttattgacattgtacatagctctgtgtaaatagaattgcaactgtcaggttttgtgttcttgttttcctttagttgggtttatttccaggtcacagaattgctgttaacactagaaaacacacttcctgcaccaacaccaataccctttcaaaagagttgtctgcaacatttttgttttcttttttaatgtccaaaagtgggggaaagtgctatttcctattttcaccaaaattggggaaggagtgccactttccagctccacttcaaattccttaaaatataactgagattgctgtggggagggaggagggcagaggctgcggtttgactttttaatttttcttttgttatttgtatttgctagtctctgatttcctcaaaacgaagtggaatttactactgttgtcagtatcggtgttttgaattggtgcctgcctatagagatatattcacagttcaaaagtcaggtgctgagagatggtttaaagacaaattcatgaaggtatattttgtgttatagttgttgatgagttctttggttttctgtatttttccccctctctttaaaacatcactgaaatttcaataaatttttattgaaatgtctaaaaaaaaaaaaaaaaaaaaaaaaaaaaaaa

SEQ ID NO: 194 - DNA, 2174 bp, Homo sapiens
aatgatagagatattagggctagttaaccacagttttacaagactcctcttcccgcgtgtgggccattgtcatgctggtgggcgtcccgcccacctgaaaggtctccccgccccgactggggtttgttgttgaagaaggagaatccccggaaaggctgagtctccagctcaaggtcaaaacgtccaaggccgaaagccctccagtttcccctggacgccttgctcctgcttctgctacgaccttctggggaaaacgaatttctcattttcttcttaaattgccattttcgctttaggagatgaatgttttcctttggctgttttggcaatgactctgaattaaagcgatgctaacgcctcttttccccctaattgttaaaagctatggactgcaggaagatggcccgcttctcttacagtgtgatttggatcatggccatttctaaagtctttgaactgggattagttgccgggctgggccatcaggaatttgctcgtccatctcggggatacctggccttcagagatgacagcatttggccccaggaggagcctgcaattcggcctcggtcttcccagcgtgtgccgcccatggggatacagcacagtaaggagctaaacagaacctgctgcctgaatgggggaacctgcatgctggggtccttttgtgcctgccctccctccttctacggacggaactgtgagcacgatgtgcgcaaagagaactgtgggtctgtgccccatgacacctggctgcccaagaagtgttccctgtgtaaatgctggcacggtcagctccgctgctttcctcaggcatttctacccggctgtgatggccttgtgatggatgagcacctcgtggcttccaggactccagaactaccaccgtctgcacgtactaccacttttatgctagttggcatctgcctttctatacaaagctactattaatcgacattgacctatttccagaaatacaattttagatatcatgcaaatttcatgaccagtaaaggctgctgctacaatgtcctaactgaaagatgatcatttgtagttgccttaaaataatgaatacatttccaaaatggtctctaacatttccttacagaactacttcttacttctttgccctgccctctcccaaaaaactacttcttttttcaaaagaaagtcagccatatctccattgtgcctaagtccagtgtttctttttttttttttttttgagacggagtctcactctgtcacccaggctggactgcaatgacgcgatcttggttcactgcaacctccgcatccggggttcaagccattctcctgcctcagcctcccaagtaactgggattacaggcatgtgtcaccatgcccagctaatttttttgtatttttagtagagatgggggtttcaccatattggccagtctggtctcgaactcctgaccttgtgatccactcgcctcagcctctcgaagtgctgagattacacacgtgagcaactgtgcaaggcctggtgtttcttgatacatgtaattctaccaaggtcttcttaatatgttcttttaaatgattgaattatatgttcagattattggagactaattctaatgtggaccttagaatacagttttgagtagagttgatcaaaatcaattaaaatagtctctttaaaaggaaagaaaacatctttaaggggaggaaccagagtgctgaaggaatggaagtccatctgcgtgtgtgcagggagactgggtaggaaagaggaagcaaatagaagagagaggttgaaaaacaaaatgggttacttgattggtgattaggtggtggtagagaagcaagtaaaaaggctaaatggaagggcaagtttccatcatctatagaaagctatataagacaagaactcccctttttttcccaaaggcattataaaaagaatgaagcctccttagaaaaaaaattatacctcaatgtccccaacaagattgcttaataaattgtgtttcctccaagctattcaattcttttaactgttgtagaagacaaaatgttcacaatatatttagttgtaaaccaagtgatcaaactacatattgtaaagcccatttttaaaatacattgtatatatgtgtatgcacagtaaaaatggaaactatattgacctaaaaaaaaaaaaa

SEQ ID NO: 195 - DNA, 6489 bp, Homo sapiens
gcacagaagtttgctgcatcactggtgagctggggagtgtcctgtgtggtgtccacttaatcttactaggaaggatcccctcatttcaacaagatgcacccactgggcctatgtaataacaatgacgaagaggacttgtatgaatatggctgggtaggagtggtgaagctggaacagccagaattggacccgaaaccatgcctcactgtcctaggcaaggccaagcgagcagtacagcggggagctactgcagtcatctttgatgtgtctgaaaacccagaagctattgatcagctgaaccagggctctgaagacccgctcaagaggccggtggtgtatgtgaagggtgcagatgccattaagctgatgaacatcgtcaacaagcagaaagtggctcgagcaaggatccagcaccgccctcctcgacaacccactgaatactttgacatggggattttcctggctttcttcgtcgtggtctccttggtctgcctcatcctccttgtcaaaatcaagctgaagcagcgacgcagtcagaattccatgaacaggctggctgtgcaggctctagagaagatggaaaccagaaagttcaactccaagagcaaggggcgccgggaggggagctgtggggccctggacacactcagcagcagctccacgtccgactgtgccatctgtctggagaagtacattgatggagaggagctgcgggtcatcccctgtactcaccggtttcacaggaagtgcgtggacccctggctgctgcagcaccacacctgcccccactgtcggcacaacatcatagaacaaaagggaaacccaagcgcggtgtgtgtggagaccagcaacctctcacgtggtcggcagcagagggtgaccctgccggtgcattaccccggccgcgtgcacaggaccaacgccatcccagcctaccctacgaggacaagcatggactcccacggcaaccccgtcaccttgctgaccatggaccggcacggggagcagagcctctattccccgcagacccccgcctacatccgcagctacccacccctccacctggaccacagcctggccgctcaccgctgcggcctggagcaccgggcctactccccagcccaccccttccgcaggcccaagttgagtggccgcagcttctccaaggcagcttgcttctcccagtatgagaccatgtaccagcactactacttccagggcctcagctacccggagcaggaggggcagtccccacctagcctcgcaccccggggcccggcccgtgcctttcctccgagcggcagtggcagcctgctcttccccaccgtggtgcacgtggccccgccctcccacctggagagcggcagcacgtccagcttcagctgctatcacggccaccgctcggtgtgcagtggctacctggccgactgcccaggcagcgacagcagcagcagcagcagctccggccagtgccactgttcctccagtgactctgtggtagactgcactgaggtcagcaaccagggcgtgtacgggagctgctccaccttccgcagctccctcagcagcgactatgaccccttcatctaccgcagccggagcccctgtcgtgccagtgaggcggggggctcgggcagctcgggccggggacctgccctgtgcttcgagggctccccgcctcccgaggagctcccggcggtgcacagtcatggtgctgggcggggcgagccttggccgggccctgcctctccctcgggggatcaggtgtccacctgcagcctggagatgaactacagcagcaactcctccctggagcacagggggcccaatagctctacctcagaagtggggctcgaggcttctcctggggccgcccctgacctcaggaggacctggaaggggggccacgagttgccgtcgtgtgcctgctgctgcgagccccagccctccccagccgggcctagcgccggagcagctggcagcagcaccttgttcctggggccccacctctacgagggctctggcccggcgggtggggagccccagtcaggaagctcccagggcttgtacggccttcaccccgaccatttgcccaggacagatggggtgaaatacgagggtctgccctgctgcttctatgaagagaagcaggtggcccgcgggggcggagggggcagcggctgctacactgaggactactcggtgagtgtgcagtacacgctcaccgaggaaccaccgcccggctgctaccccggggcccgggacctgagccagcgcatccccatcattccagaggatgtggactgtgatctgggcctgccctcggactgccaagggacccacagcctcggctcctggggtgggacgcgaggcccggataccccacggccccacaggggcctgggagcaacccgggaagaggagcgggctctgtgctgccaggctagggccctactgcggcctggctgccctccggaggaggcgggtgctgtcagggccaacttccctagtgccctccaggacactcaggagtccagcaccactgccactgaggctgcaggaccgagatctcactcagcagacagcagcagcccgggagcctgagctcaggaggaactcttacctggaaattgggaactgtatggagactccaaactgacttctttcaaaaaacaaaaacaaaaaatttttttagctttgacaaacacacaaaagtggtaataaagagagccctccttgtcaacccaaaatgtgagccccctgtggcaaaaccaccccctaccccattaacaaatcaacagacaaaattctccgagtcctttgcctcttttgataacatgttgttctgttttgtaaagtgtgtgtgcttggggttccgaggtgtgggattgagttctctgctttgtttttttttaagatattgtatgtaaatgtaaaaagttatttaaatatatattttaaagaaccctaactgccaacttttgctgaaaaagaaaaaaaaatcactgctgcattaaatgaaccacatcatgtgtagatactgttgtctccctgaagggagctcaggcctttgaaaagctcagggcttcacctgccttagaaaatgaaccagaaacttgaagtaaagctagttgataggggtacaggctctgaggagcagtgcaaaactgcctctttctttctcgtggcaaatcccaatgtacacgatttcaggtctcagacgccatgcctctccagcccacgcctttaggcaggtgatggcagcagctaggaatagggtgtacatgatccacagccctgcggagccaggtcaagccgctgctatgaaagctccagggtgatggggacgattctgcccagtgtcctcagtctgtcccctcaggtcatggtcccaagtgaaatgacagagttcacagccctggtcttggctgaggtccaggtcatagtaagggcatgttcttggggccctcgacctgaactctgaccctccgggcagggaagaggaggttgtcccctttggttgtcctggctttggagtcctttgcaaaaatattttgggccccctgccactggctgcagaaatggctcgacggggtgtgtggggacagacacccagaaggaatgtacttttgtggccttggtgtccgatggggctgggggagagtgctctccactgacccagcagcacacccatgtgcagtgcgcctgcatctgtgtgggggcagccacaccccttggctgctgcttccttgggctgcctttctgggggcatgtgactggacctacgaggtctgcactgagctccatttgaatgatacctttcctatcccatttcccccacggaagcaccgcttcagggttattcagtcctctgcctcatggctgaaattgctcatctcgtctgcagatgtctactatcctgtctacctaatgcactattatgtattgattctccatgagacagagagagagagagactatcagatagtttacacccaaagggtaggtttttgtatatttttccagccttttttattaaggggaaggggagagtttaaaaacccaaaccgttgtggttttaaggtgtttcatttttaaaagggagagagaatctatttaaagctatttcagatcagggattgtcatccttttttgtccaatgtattccttgttctttaaaaaaattttttttagaggaaactaatattagtctttgtgttcactaactcttctggtcacttgtatttatttattcattcattcatcagatatttgttgccatctgaaagaactggcccagtgggtctgaaagctcgcttgagaataggaaacttgagacctggccccctgtgggtaggagaacaaggaccacctgggttctccagtcttgaacgagaatctcactcttatcagaatgtttttcttaacctcagcgtatgatgaggaaatttacttatctctagctaggatttgacaaattccaacatcaaatgatcaaaacatttgccactgaggcttcactggtgagatccgttctccgtcctcgggtgcagtcccttgggggctgctcctcggactgcgccccgcacacctgttatcgagggtgtgagaagcgcctaagctggtgacatgtgatctgggacgccttcatttctcgggccaggagtagcagctgctaaggacagcagcttgcattgcgtggttttagggaagcagggtctggcttttaatatgaactgcaaaaagcagcttctcactgatatttttttgttgttgtttctggggggtttttttgttttgtttttaatgcctttgagtgcatattttcttcctcgtctgaaaccgaactcccaaagtggctttctttagccctggctggaaaaccacctctcaatagccttaagcaataaatagatgagtagagaatgtggcttcaactgggcttattaaagtaagtgtgtctagttttcacttgaacaagtgatagctgcagatggcgaaagaaacccatttaatttttgtagcttacaggtggtagaaacaaaaatgcaattttaaaaccttaaataccaaataccaaccattgccttttttttttttgagatggaattttgctcttgtcacccaggctggagtgcaatggcgcgatctcacctcactgcaacctctgcctcccgggtccaagtgattctcctgcctcagcctcccaagtagctgggattacaggcatgcgccaccacacccagctaattttgtatttttggtagagacagggtatctccatgttggtcaggctggtcttggattcccgacctcaggtgatccgcccacctcggcctcccaaagtgctgggattacaggcgtgagccaccatgcctgcccagcaataccaaccattgtcttttaaattcgtgttggcttctcagacagggagatcactggaataaaataaccgatggtcttattttgtcacacgtaaatcaaaagaaatgtcctctttgaagttgtaagactccaccaatgacagacacccttttcggtggactctgagtggtgtgtagtggttttatagccatggaaactaggagtatctcactttccactgagaacccctgcccccaatccctctaagttggggtgtggcagttgggcagggtcaagtgacccagccctggctgtaggacagccatatacagtgaagagttctagaaccagctaaaaatggaagtttgggtgtttaccaacaaggtacctctttatggatgcagccccagtaagctggctttaactctcagctccttccctgtctcctcctaatccaagcccttttataaaataaagccccttctgtcccactgctcacatacttatgtgctgctagtctctactcgaagttcgtgcaggactaatgcttttaaaatgaggtctaaaaaataattactagtcgagactattattctttaaacagaactgcctttttctactctttatgtaaactctttctattgtgttggtctaacaaggcactattttaaaattttttaatttttcccatagcacttaaaagagattttgtaaagaccttgctgtaaagattttgtaataaaatggtctaagggctctttttccaacattaccatttttaaaaaatgttttaaaagctagaagacaacttatgtatattctgtatatgtatagcagcacatttcatttatggaaatatgttctcagaatatttatttactaatatatttatcttaagccatgtcttatgttgagagtgtgacattgttggaataatcattgaaaatgactaacacaagaccctgtaaatacatgataattgcacacagattttacatatttgcagaccaaaaatgatttaaaacaagttgtagtcttctatggttttgtaacaaattgtacacatgactgtaaaaaaaaaatacaattttatcaagtatgtgttaaaaaaaaaaaaaaaaaaaa

SEQ ID NO: 196 - DNA, 5843 bp, Homo sapiens
gagcggacaggcgtggcggccggagccccagcatccctgcttgaggtccaggagcggagcccgcggccaccgccgcctgatcagcgcgaccccggcccgcgcccgccccgcccggcaagatgctgcccgtgtaccaggaggtgaagcccaacccgctgcaggacgcgaacctctgctcacgcgtgttcttctggtggctcaatcccttgtttaaaattggccataaacggagattagaggaagatgatatgtattcagtgctgccagaagaccgctcacagcaccttggagaggagttgcaagggttctgggataaagaagttttaagagctgagaatgacgcacagaagccttctttaacaagagcaatcataaagtgttactggaaatcttatttagttttgggaatttttacgttaattgaggaaagtgccaaagtaatccagcccatatttttgggaaaaattattaattattttgaaaattatgatcccatggattctgtggctttgaacacagcgtacgcctatgccacggtgctgactttttgcacgctcattttggctatactgcatcacttatatttttatcacgttcagtgtgctgggatgaggttacgagtagccatgtgccatatgatttatcggaaggcacttcgtcttagtaacatggccatggggaagacaaccacaggccagatagtcaatctgctgtccaatgatgtgaacaagtttgatcaggtgacagtgttcttacacttcctgtgggcaggaccactgcaggcgattgcagtgactgccctactctggatggagataggaatatcgtgccttgctgggatggcagttctaatcattctcctgcccttgcaaagctgttttgggaagttgttctcatcactgaggagtaaaactgcaactttcacggatgccaggatcaggaccatgaatgaagttataactggtataaggataataaaaatgtacgcctgggaaaagtcattttcaaatcttattaccaatttgagaaagaaggagatttccaagattctgagaagttcctgcctcagagggatgaatttggcttcatttttcagtgcaagcaaaatcatcgtgtttgtgaccttcaccacctacgtgctcctcggcagtgtgatcacagccagccgcgtgttcgtggcagtgacgctgtatggggctgtgcggctgacggttaccctcttcttcccctcagccattgagagggtgtcagaggcaatcgtcagcatccgaagaatccagacctttttgctacttgatgagatatcacagcgcaaccgtcagctgccgtcagatggtaaaaagatggtgcatgtgcaggattttactgctttttgggataaggcatcagagaccccaactctacaaggcctttcctttactgtcagacctggcgaattgttagctgtggtcggccccgtgggagcagggaagtcatcactgttaagtgccgtgctcggggaattggccccaagtcacgggctggtcagcgtgcatggaagaattgcctatgtgtctcagcagccctgggtgttctcgggaactctgaggagtaatattttatttgggaagaaatacgaaaaggaacgatatgaaaaagtcataaaggcttgtgctctgaaaaaggatttacagctgttggaggatggtgatctgactgtgataggagatcggggaaccacgctgagtggagggcagaaagcacgggtaaaccttgcaagagcagtgtatcaagatgctgacatctatctcctggacgatcctctcagtgcagtagatgcggaagttagcagacacttgttcgaactgtgtatttgtcaaattttgcatgagaagatcacaattttagtgactcatcagttgcagtacctcaaagctgcaagtcagattctgatattgaaagatggtaaaatggtgcagaaggggacttacactgagttcctaaaatctggtatagattttggctcccttttaaagaaggataatgaggaaagtgaacaacctccagttccaggaactcccacactaaggaatcgtaccttctcagagtcttcggtttggtctcaacaatcttctagaccctccttgaaagatggtgctctggagagccaagatacagagaatgtcccagttacactatcagaggagaaccgttctgaaggaaaagttggttttcaggcctataagaattacttcagagctggtgctcactggattgtcttcattttccttattctcctaaacactgcagctcaggttgcctatgtgcttcaagattggtggctttcatactgggcaaacaaacaaagtatgctaaatgtcactgtaaatggaggaggaaatgtaaccgagaagctagatcttaactggtacttaggaatttattcaggtttaactgtagctaccgttctttttggcatagcaagatctctattggtattctacgtccttgttaactcttcacaaactttgcacaacaaaatgtttgagtcaattctgaaagctccggtattattctttgatagaaatccaataggaagaattttaaatcgtttctccaaagacattggacacttggatgatttgctgccgctgacgtttttagatttcatccagacattgctacaagtggttggtgtggtctctgtggctgtggccgtgattccttggatcgcaatacccttggttccccttggaatcattttcatttttcttcggcgatattttttggaaacgtcaagagatgtgaagcgcctggaatctacaactcggagtccagtgttttcccacttatcatcttctctccaggggctctggaccatccgggcatacaaagcagaagagaggtgtcaggaactgtttgatgcacaccaggatttacattcagaggcttggttcttgtttttgacaacgtcccgctggtttgccgtccgtctggatgccatctgtgccatgtttgtcatcatcgttgcctttgggtccctgattctggcaaaaactctggatgccgggcaggttggtttggcactgtcctatgccctcacgctcatggggatgtttcagtggtgtgttcgacaaagtgctgaagttgagaatatgatgatctcagtagaaagggtcattgaatacacagaccttgaaaaagaagcaccttgggaatatcagaaacgcccaccaccagcctggccccatgaaggagtgataatctttgacaatgtgaacttcatgtacagtccaggtgggcctctggtactgaagcatctgacagcactcattaaatcacaagaaaaggttggcattgtgggaagaaccggagctggaaaaagttccctcatctcagccctttttagattgtcagaacccgaaggtaaaatttggattgataagatcttgacaactgaaattggacttcacgatttaaggaagaagatgtcaatcatacctcaggaacctgttttgttcactggaacaatgaggaaaaacctggatccctttaatgagcacacggatgaggaactgtggaatgccttacaagaggtacaacttaaagaaaccattgaagatcttcctggtaaaatggatactgaattagcagaatcaggatccaattttagtgttggacaaagacaactggtgtgccttgccagggcaattctcaggaaaaatcagatattgattattgatgaagcgacggcaaatgtggatccaagaactgatgagttaatacaaaaaaaaatccgggagaaatttgcccactgcaccgtgctaaccattgcacacagattgaacaccattattgacagcgacaagataatggttttagattcaggaagactgaaagaatatgatgagccgtatgttttgctgcaaaataaagagagcctattttacaagatggtgcaacaactgggcaaggcagaagccgctgccctcactgaaacagcaaaacaggtatacttcaaaagaaattatccacatattggtcacactgaccacatggttacaaacacttccaatggacagccctcgaccttaactattttcgagacagcactgtgaatccaaccaaaatgtcaagtccgttccgaaggcattttccactagtttttggactatgtaaaccacattgtacttttttttactttggcaacaaatatttatacatacaagatgctagttcatttgaatatttctcccaacttatccaaggatctccagctctaacaaaatggtttatttttatttaaatgtcaatagttgttttttaaaatccaaatcagaggtgcaggccaccagttaaatgccgtctatcaggttttgtgccttaagagactacagagtcaaagctcatttttaaaggagtaggacaaagttgtcacaggtttttgttgttgtttttattgcccccaaaattacatgttaatttccatttatatcagggattctatttacttgaagactgtgaagttgccattttgtctcattgttttctttgacataactaggatccattatttcccctgaaggcttcttgttagaaaatagtacagttacaaccaataggaacaacaaaaagaaaaagtttgtgacattgtagtagggagtgtgtaccccttactccccatcaaaaaaaaaaatggatacatggttaaaggatagaagggcaatattttatcatatgttctaaaagagaaggaagagaaaatactactttctcaaaatggaagcccttaaaggtgctttgatactgaaggacacaaatgtgaccgtccatcctcctttagagttgcatgacttggacacggtaactgttgcagttttagactcagcattgtgacacttcccaagaaggccaaacctctaaccgacattcctgaaatacgtggcattattcttttttggatttctcatttatggaaggctaaccctctgttgactgtaagccttttggtttgggctgtattgaaatcctttctaaattgcatgaataggctctgctaacgtgatgagacaaactgaaaattattgcaagcattgactataattatgcagtacgttctcaggatgcatccaggggttcattttcatgagcctgtccaggttagtttactcctgaccactaatagcattgtcatttgggctttctgttgaatgaatcaacaaaccacaatacttcctgggaccttttgtactttatttgaactatgagtctttaatttttcctgatgatggtggctgtaatatgttgagttcagtttactaaaggttttactattatggtttgaagtggagtctcatgacctctcagaataaggtgtcacctccctgaaattgcatatatgtatatagacatgcacacgtgtgcatttgtttgtatacatatatttgtccttcgtatagcaagttttttgctcatcagcagagagcaacagatgttttattgagtgaagccttaaaaagcacacaccacacacagctaactgccaaaatacattgaccgtagtagctgttcaactcctagtacttagaaatacacgtatggttaatgttcagtccaacaaaccacacacagtaaatgtttattaatagtcatggttcgtattttaggtgactgaaattgcatcagtgatcataatgaggtttgttaaaacgatagctatattcaaaatgtctatatgtttatttggacttttgaggttaaagacagtcatataaacgtcctgtttctgttttaatgttatcatagaattttttaatgaaactaaattcaattgaaataaatgatagttttcatctccattcaga

SEQ ID NO: 197 - DNA, 10661 bp, Homo sapiens
cgagatcccggggagccagcttgctgggagagcgggacggtccggagcaagcccagaggcagaggaggcgacagagggaaaaagggccgagctagccgctccagtgctgtacaggagccgaagggacgcaccacgccagccccagcccggctccagcgacagccaacgcctcttgcagcgcggcggcttcgaagccgccgcccggagctgccctttcctcttcggtgaagtttttaaaagctgctaaagactcggaggaagcaaggaaagtgcctggtaggactgacggctgcctttgtcctcctcctctccaccccgcctccccccaccctgccttccccccctcccccgtcttctctcccgcagctgcctcagtcggctactctcagccaacccccctcaccacccttctccccacccgcccccccgcccccgtcggcccagcgctgccagcccgagtttgcagagaggtaactccctttggctgcgagcgggcgagctagctgcacattgcaaagaaggctcttaggagccaggcgactggggagcggcttcagcactgcagccacgacccgcctggttaggctgcacgcggagagaaccctctgttttcccccactctctctccacctcctcctgccttccccaccccgagtgcggagccagagatcaaaagatgaaaaggcagtcaggtcttcagtagccaaaaaacaaaacaaacaaaaacaaaaaagccgaaataaaagaaaaagataataactcagttcttatttgcacctacttcagtggacactgaatttggaaggtggaggattttgtttttttcttttaagatctgggcatcttttgaatctacccttcaagtattaagagacagactgtgagcctagcagggcagatcttgtccaccgtgtgtcttcttctgcacgagactttgaggctgtcagagcgctttttgcgtggttgctcccgcaagtttccttctctggagcttcccgcaggtgggcagctagctgcagcgactaccgcatcatcacagcctgttgaactcttctgagcaagagaaggggaggcggggtaagggaagtaggtggaagattcagccaagctcaaggatggaagtgcagttagggctgggaagggtctaccctcggccgccgtccaagacctaccgaggagctttccagaatctgttccagagcgtgcgcgaagtgatccagaacccgggccccaggcacccagaggccgcgagcgcagcacctcccggcgccagtttgctgctgctgcagcagcagcagcagcagcagcagcagcagcagcagcagcagcagcagcagcagcagcagcagcagcaagagactagccccaggcagcagcagcagcagcagggtgaggatggttctccccaagcccatcgtagaggccccacaggctacctggtcctggatgaggaacagcaaccttcacagccgcagtcggccctggagtgccaccccgagagaggttgcgtcccagagcctggagccgccgtggccgccagcaaggggctgccgcagcagctgccagcacctccggacgaggatgactcagctgccccatccacgttgtccctgctgggccccactttccccggcttaagcagctgctccgctgaccttaaagacatcctgagcgaggccagcaccatgcaactccttcagcaacagcagcaggaagcagtatccgaaggcagcagcagcgggagagcgagggaggcctcgggggctcccacttcctccaaggacaattacttagggggcacttcgaccatttctgacaacgccaaggagttgtgtaaggcagtgtcggtgtccatgggcctgggtgtggaggcgttggagcatctgagtccaggggaacagcttcggggggattgcatgtacgccccacttttgggagttccacccgctgtgcgtcccactccttgtgccccattggccgaatgcaaaggttctctgctagacgacagcgcaggcaagagcactgaagatactgctgagtattcccctttcaagggaggttacaccaaagggctagaaggcgagagcctaggctgctctggcagcgctgcagcagggagctccgggacacttgaactgccgtctaccctgtctctctacaagtccggagcactggacgaggcagctgcgtaccagagtcgcgactactacaactttccactggctctggccggaccgccgccccctccgccgcctccccatccccacgctcgcatcaagctggagaacccgctggactacggcagcgcctgggcggctgcggcggcgcagtgccgctatggggacctggcgagcctgcatggcgcgggtgcagcgggacccggttctgggtcaccctcagccgccgcttcctcatcctggcacactctcttcacagccgaagaaggccagttgtatggaccgtgtggtggtggtgggggtggtggcggcggcggcggcggcggcggcggcggcggcggcggcggcggcggcggcgaggcgggagctgtagccccctacggctacactcggccccctcaggggctggcgggccaggaaagcgacttcaccgcacctgatgtgtggtaccctggcggcatggtgagcagagtgccctatcccagtcccacttgtgtcaaaagcgaaatgggcccctggatggatagctactccggaccttacggggacatgcgtttggagactgccagggaccatgttttgcccattgactattactttccaccccagaagacctgcctgatctgtggagatgaagcttctgggtgtcactatggagctctcacatgtggaagctgcaaggtcttcttcaaaagagccgctgaagggaaacagaagtacctgtgcgccagcagaaatgattgcactattgataaattccgaaggaaaaattgtccatcttgtcgtcttcggaaatgttatgaagcagggatgactctgggagcccggaagctgaagaaacttggtaatctgaaactacaggaggaaggagaggcttccagcaccaccagccccactgaggagacaacccagaagctgacagtgtcacacattgaaggctatgaatgtcagcccatctttctgaatgtcctggaagccattgagccaggtgtagtgtgtgctggacacgacaacaaccagcccgactcctttgcagccttgctctctagcctcaatgaactgggagagagacagcttgtacacgtggtcaagtgggccaaggccttgcctggcttccgcaacttacacgtggacgaccagatggctgtcattcagtactcctggatggggctcatggtgtttgccatgggctggcgatccttcaccaatgtcaactccaggatgctctacttcgcccctgatctggttttcaatgagtaccgcatgcacaagtcccggatgtacagccagtgtgtccgaatgaggcacctctctcaagagtttggatggctccaaatcaccccccaggaattcctgtgcatgaaagcactgctactcttcagcattattccagtggatgggctgaaaaatcaaaaattctttgatgaacttcgaatgaactacatcaaggaactcgatcgtatcattgcatgcaaaagaaaaaatcccacatcctgctcaagacgcttctaccagctcaccaagctcctggactccgtgcagcctattgcgagagagctgcatcagttcacttttgacctgctaatcaagtcacacatggtgagcgtggactttccggaaatgatggcagagatcatctctgtgcaagtgcccaagatcctttctgggaaagtcaagcccatctatttccacacccagtgaagcattggaaaccctatttccccaccccagctcatgccccctttcagatgtcttctgcctgttataactctgcactactcctctgcagtgccttggggaatttcctctattgatgtacagtctgtcatgaacatgttcctgaattctatttgctgggctttttttttctctttctctcctttctttttcttcttccctccctatctaaccctcccatggcaccttcagactttgcttcccattgtggctcctatctgtgttttgaatggtgttgtatgcctttaaatctgtgatgatcctcatatggcccagtgtcaagttgtgcttgtttacagcactactctgtgccagccacacaaacgtttacttatcttatgccacgggaagtttagagagctaagattatctggggaaatcaaaacaaaaacaagcaaacaaaaaaaaaaagcaaaaacaaaacaaaaaataagccaaaaaaccttgctagtgttttttcctcaaaaataaataaataaataaataaatacgtacatacatacacacatacatacaaacatatagaaatccccaaagaggccaatagtgacgagaaggtgaaaattgcaggcccatggggagttactgattttttcatctcctccctccacgggagactttattttctgccaatggctattgccattagagggcagagtgaccccagagctgagttgggcaggggggtggacagagaggagaggacaaggagggcaatggagcatcagtacctgcccacagccttggtccctgggggctagactgctcaactgtggagcaattcattatactgaaaatgtgcttgttgttgaaaatttgtctgcatgttaatgcctcacccccaaacccttttctctctcactctctgcctccaacttcagattgactttcaatagtttttctaagacctttgaactgaatgttctcttcagccaaaacttggcgacttccacagaaaagtctgaccactgagaagaaggagagcagagatttaaccctttgtaaggccccatttggatccaggtctgctttctcatgtgtgagtcagggaggagctggagccagaggagaagaaaatgatagcttggctgttctcctgcttaggacactgactgaatagttaaactctcactgccactaccttttccccacctttaaaagacctgaatgaagttttctgccaaactccgtgaagccacaagcaccttatgtcctcccttcagtgttttgtgggcctgaatttcatcacactgcatttcagccatggtcatcaagcctgtttgcttcttttgggcatgttcacagattctctgttaagagcccccaccaccaagaaggttagcaggccaacagctctgacatctatctgtagatgccagtagtcacaaagatttcttaccaactctcagatcgctggagcccttagacaaactggaaagaaggcatcaaagggatcaggcaagctgggcgtcttgcccttgtcccccagagatgataccctcccagcaagtggagaagttctcacttccttctttagagcagctaaaggggctacccagatcagggttgaagagaaaactcaattaccagggtgggaagaatgaaggcactagaaccagaaaccctgcaaatgctcttcttgtcacccagcatatccacctgcagaagtcatgagaagagagaaggaacaaagaggagactctgactactgaattaaaatcttcagcggcaaagcctaaagccagatggacaccatctggtgagtttactcatcatcctcctctgctgctgattctgggctctgacattgcccatactcactcagattccccacctttgttgctgcctcttagtcagagggaggccaaaccattgagactttctacagaaccatggcttctttcggaaaggtctggttggtgtggctccaatactttgccacccatgaactcagggtgtgccctgggacactggttttatatagtcttttggcacacctgtgttctgttgacttcgttcttcaagcccaagtgcaagggaaaatgtccacctactttctcatcttggcctctgcctccttacttagctcttaatctcatctgttgaactcaagaaatcaagggccagtcatcaagctgcccattttaattgattcactctgtttgttgagaggatagtttctgagtgacatgatatgatccacaagggtttccttccctgatttctgcattgatattaatagccaaacgaacttcaaaacagctttaaataacaagggagaggggaacctaagatgagtaatatgccaatccaagactgctggagaaaactaaagctgacaggttccctttttggggtgggatagacatgttctggttttctttattattacacaatctggctcatgtacaggatcacttttagctgttttaaacagaaaaaaatatccaccactcttttcagttacactaggttacattttaataggtcctttacatctgttttggaatgattttcatcttttgtgatacacagattgaattatatcattttcatatctctccttgtaaatactagaagctctcctttacatttctctatcaaatttttcatctttatgggtttcccaattgtgactcttgtcttcatgaatatatgtttttcatttgcaaaagccaaaaatcagtgaaacagcagtgtaattaaaagcaacaactggattactccaaatttccaaatgacaaaactagggaaaaatagcctacacaagcctttaggcctactctttctgtgcttgggtttgagtgaacaaaggagattttagcttggctctgttctcccatggatgaaaggaggaggattttttttttcttttggccattgatgttctagccaatgtaattgacagaagtctcattttgcatgcgctctgctctacaaacagagttggtatggttggtatactgtactcacctgtgagggactggccactcagacccacttagctggtgagctagaagatgaggatcactcactggaaaagtcacaaggaccatctccaaacaagttggcagtgctcgatgtggacgaagagtgaggaagagaaaaagaaggagcaccagggagaaggctccgtctgtgctgggcagcagacagctgccaggatcacgaactctgtagtcaaagaaaagagtcgtgtggcagtttcagctctcgttcattgggcagctcgcctaggcccagcctctgagctgacatgggagttgttggattctttgtttcatagctttttctatgccataggcaatattgttgttcttggaaagtttattatttttttaactcccttactctgagaaagggatattttgaaggactgtcatatatctttgaaaaaagaaaatctgtaatacatatatttttatgtatgttcactggcactaaaaaatatagagagcttcattctgtcctttgggtagttgctgaggtaattgtccaggttgaaaaataatgtgctgatgctagagtccctctctgtccatactctacttctaaatacatataggcatacatagcaagttttatttgacttgtactttaagagaaaatatgtccaccatccacatgatgcacaaatgagctaacattgagcttcaagtagcttctaagtgtttgtttcattaggcacagcacagatgtggcctttccccccttctctcccttgatatctggcagggcataaaggcccaggccacttcctctgccccttcccagccctgcaccaaagctgcatttcaggagactctctccagacagcccagtaactacccgagcatggcccctgcatagccctggaaaaataagaggctgactgtctacgaattatcttgtgccagttgcccaggtgagagggcactgggccaagggagtggttttcatgtttgacccactacaaggggtcatgggaatcaggaatgccaaagcaccagatcaaatccaaaacttaaagtcaaaataagccattcagcatgttcagtttcttggaaaaggaagtttctacccctgatgcctttgtaggcagatctgttctcaccattaatctttttgaaaatcttttaaagcagtttttaaaaagagagatgaaagcatcacattatataaccaaagattacattgtacctgctaagataccaaaattcataagggcagggggggagcaagcattagtgcctctttgataagctgtccaaagacagactaaaggactctgctggtgactgacttataagagctttgtgggtttttttttccctaataatatacatgtttagaagaattgaaaataatttcgggaaaatgggattatgggtccttcactaagtgattttataagcagaactggctttccttttctctagtagttgctgagcaaattgttgaagctccatcattgcatggttggaaatggagctgttcttagccactgtgtttgctagtgcccatgttagcttatctgaagatgtgaaacccttgctgataagggagcatttaaagtactagattttgcactagagggacagcaggcagaaatccttatttctgcccactttggatggcacaaaaagttatctgcagttgaaggcagaaagttgaaatacattgtaaatgaatatttgtatccatgtttcaaaattgaaatatatatatatatatatatatatatatatatatatatatagtgtgtgtgtgtgttctgatagctttaactttctctgcatctttatatttggttccagatcacacctgatgccatgtacttgtgagagaggatgcagttttgttttggaagctctctcagaacaaacaagacacctggattgatcagttaactaaaagttttctcccctattgggtttgacccacaggtcctgtgaaggagcagagggataaaaagagtagaggacatgatacattgtactttactagttcaagacagatgaatgtggaaagcataaaaactcaatggaactgactgagatttaccacagggaaggcccaaacttggggccaaaagcctacccaagtgattgaccagtggccccctaatgggacctgagctgttggaagaagagaactgttccttggtcttcaccatccttgtgagagaagggcagtttcctgcattggaacctggagcaagcgctctatctttcacacaaattccctcacctgagattgaggtgctcttgttactgggtgtctgtgtgctgtaattctggttttggatatgttctgtaaagattttgacaaatgaaaatgtgtttttctctgttaaaacttgtcagagtactagaagttgtatctctgtaggtgcaggtccatttctgcccacaggtagggtgtttttctttgattaagagattgacacttctgttgcctaggacctcccaactcaaccatttctaggtgaaggcagaaaaatccacattagttactcctcttcagacatttcagctgagataacaaatcttttggaattttttcacccatagaaagagtggtagatatttgaatttagcaggtggagtttcatagtaaaaacagcttttgactcagctttgatttatcctcatttgatttggccagaaagtaggtaatatgcattgattggcttctgattccaattcagtatagcaaggtgctaggttttttcctttccccacctgtctcttagcctggggaattaaatgagaagccttagaatgggtggcccttgtgacctgaaacacttcccacataagctacttaacaagattgtcatggagctgcagattccattgcccaccaaagactagaacacacacatatccatacaccaaaggaaagacaattctgaaatgctgtttctctggtggttccctctctggctgctgcctcacagtatgggaacctgtactctgcagaggtgacaggccagatttgcattatctcacaaccttagcccttggtgctaactgtcctacagtgaagtgcctggggggttgtcctatcccataagccacttggatgctgacagcagccaccatcagaatgacccacgcaaaaaaaagaaaaaaaaaattaaaaagtcccctcacaacccagtgacacctttctgctttcctctagactggaacattgattagggagtgcctcagacatgacattcttgtgctgtccttggaattaatctggcagcaggagggagcagactatgtaaacagagataaaaattaattttcaatattgaaggaaaaaagaaataagaagagagagagaaagaaagcatcacacaaagattttcttaaaagaaacaattttgcttgaaatctctttagatggggctcatttctcacggtggcacttggcctccactgggcagcaggaccagctccaagcgctagtgttctgttctctttttgtaatcttggaatcttttgttgctctaaatacaattaaaaatggcagaaacttgtttgttggactacatgtgtgactttgggtctgtctctgcctctgctttcagaaatgtcatccattgtgtaaaatattggcttactggtctgccagctaaaacttggccacatcccctgttatggctgcaggatcgagttattgttaacaaagagacccaagaaaagctgctaatgtcctcttatcattgttgttaatttgttaaaacataaagaaatctaaaatttcaaaaaa

SEQ ID NO: 198 - DNA, 1849 bp, Homo sapiens
aagagcgccacgcggtgggcgaggggatgccctagtaaattcgcaggtctcttgactctttccgcctttgtttacaaccctgccatgatctccctcttgcaaaagcgagggctacagaacaggcattcaggagtcctgtgctccagtcacagccttttctgttcttcagctaggagacaccaaaccctcaggaagatttactatagctaagagaaaactgcagcagaaagggcgcggctacctacttcttaaattccgtttgtggaccctcagactcttagtcccctactcccagatacagcggccctaccgtggctcctggcaaggtggcatccacttttgtagtaagcatggatctcggaatccctgacctgctggacgcgtggctggagcccccagaggatatcttctcgacaggatccgtcctggagctgggactccactgcccccctccagaggttccggtaactaggctacaggaacagggactgcaaggctggaagtccggtggggaccgtggctgtggccttcaagagagtgagcctgaagatttcttgaagcttttcattgatcccaatgaggtgtactgctcagaagcatctcctggcagtgacagtggcatctctgaggacccctgccatccagacagtccccctgcccccagggcaaccagttctcctatgctctatgaggttgtctatgaggcaggggccctggagaggatgcagggggaaactgggccaaatgtaggccttatctccatccagctagatcagtggagcccagcatttatggtgcctgattcctgcatggtcagtgagctgccctttgatgctcatgcccacatcctgcccagagcaggcaccgtagccccagtgccctgtacaaccctgctgccctgtcaaaccctgttcctgaccgatgaggagaagcgtctgctggggcaggaaggggtttccctgccctctcacctgcccctcaccaaggcagaggagagggtcctcaagaaggtcaggaggaaaatccgtaacaagcagtcagctcaggacagtcggcggcggaagaaggagtacattgatgggctggagagcagggtggcagcctgttctgcacagaaccaagaattacagaaaaaagtccaggagctggagaggcacaacatctccttggtagctcagctccgccagctgcagacgctaattgctcaaacttccaacaaagctgcccagaccagcacttgtgttttgattcttcttttttccctggctctcatcatcctgcccagcttcagtccattccagagtcgaccagaagctgggtctgaggattaccagcctcacggagtgacttccagaaatatcctgacccacaaggacgtaacagaaaatctggagacccaagtggtagagtccagactgagggagccacctggagccaaggatgcaaatggctcaacaaggacactgcttgagaagatgggagggaagccaagacccagtgggcgcatccggtccgtgctgcatgcagatgagatgtgagctggaacagaccttcctggcccacttcctgatcacaaggaatcctgggcttccttatggctttgcttcccactgggattcctacttaggtgtctgccctcaggggtccaaatcacttcaggacaccccaagagatgtcctttagtctctgcctgaggcctagtctgcatttgtttgcatatatgagagggtacctcaaatacttctgttatgtatctgtgattttatttcttctttgggtatagggttgaggggaaataagttttgagtgagaaataaacgttttagctgaaattgtaaaaaaaaaaaaa

SEQ ID NO: 199 - DNA, 4286 bp, Homo sapiens
aatcgcgaggcggcgggcgatcccgggctccccgggctgtgggctacaggcgcagagcgggccaggcgcggagctggcggcagtgacaggaggcgcgaacccgcagcgcttaccgcgcggcgccgcaccatggagcccgccgtgtcgctggccgtgtgcgcgctgctcttcctgctgtgggtgcgcctgaaggggctggagttcgtgctcatccaccagcgctgggtgttcgtgtgcctcttcctcctgccgctctcgcttatcttcgatatctactactacgtgcgcgcctgggtggtgttcaagctcagcagcgctccgcgcctgcacgagcagcgcgtgcgggacatccagaagcaggtgcgggaatggaaggagcagggtagcaagaccttcatgtgcacggggcgccctggctggctcactgtctcactacgtgtcgggaagtacaagaagacacacaaaaacatcatgatcaacctgatggacattctggaagtggacaccaagaaacagattgtccgtgtggagcccttggtgaccatgggccaggtgactgccctgctgacctccattggctggactctccccgtgttgcctgagcttgatgacctcacagtggggggcttgatcatgggcacaggcatcgagtcatcatcccacaagtacggcctgttccaacacatctgcactgcttacgagctggtcctggctgatggcagctttgtgcgatgcactccgtccgaaaactcagacctgttctatgccgtaccctggtcctgtgggacgctgggtttcctggtggccgctgagatccgcatcatccctgccaagaagtacgtcaagctgcgtttcgagccagtgcggggcctggaggctatctgtgccaagttcacccacgagtcccagcggcaggagaaccacttcgtggaagggctgctctactccctggatgaggctgtcattatgacaggggtcatgacagatgaggcagagcccagcaagctgaatagcattggcaattactacaagccgtggttctttaagcatgtggagaactatctgaagacaaaccgagagggcctggagtacattcccttgagacactactaccaccgccacacgcgcagcatcttctgggagctccaggacattatcccctttggcaacaaccccatcttccgctacctctttggctggatggtgcctcccaagatctccctcctgaagctgacccagggtgagaccctgcgcaagctgtacgagcagcaccacgtggtgcaggacatgctggtgcccatgaagtgcctgcagcaggccctgcacaccttccaaaacgacatccacgtctaccccatctggctgtgtccgttcatcctgcccagccagccaggcctagtgcaccccaaaggaaatgaggcagagctctacatcgacattggagcatatggggagccgcgtgtgaaacactttgaagccaggtcctgcatgaggcagctggagaagtttgtccgcagcgtgcatggcttccagatgctgtatgccgactgctacatgaaccgggaggagttctgggagatgtttgatggctccttgtaccacaagctgcgagagaagctgggttgccaggacgccttccccgaggtgtacgacaagatctgcaaggccgccaggcactgagctggagcccgcctggagagacagacacgtgtgagtggtcaggcatcttcccttcactcaagcttggctgctttcctagatccacactttcaaagagaaacccctccagaactcccaccctgacagcccaacaccaccttcctcctggcttccagggggcagcccagtggaatggaaagaatgtgggatttggagtcagacaagcctgagtccagttccccgtttagaactcattagctgtgtgactctgggtgagtcccttaacccctctgagcccgggtctcttcattagttgaaagggatagtaatacctacttgcaggttgttgtcatctgagttgagcactggtcacattgaaggtgctgggtaagtggtagctcttgttgcttcccgttcagcgtcacatctgcagtggagcctgaaaaggctccacattaggtcacctgtgcacagccatggctggaatgatgaaggggatacgctggagttgccctgccatcgcctccatcagccagacgaggtcctcacaggagaaggacagctcttccccaccctgggatctcaggagggcagccacggagtggggaggccccagatgcgctgtgccaaagccaggtccgaggccaaagttctccctgccatccttggtgccgtcctgccccttcctccttcatgcctgggcctgcaggcccaccccagccaccactgagtccactcggagtgccctgtgttcctggagaaggcattccagggttgaatcttgtcccagcctcagcctgggacacctaggtggagagagtggtctccgctctgaattggatccaggggacctgggctcattcttcttggctcaccaaccctgcaggcctcatctttcccaaaacccactttgtcttggtgggagtgggtccgcgctgctctgcagcaggggctggggagtggacagcatcaggtgggaaagtggagtccaccctcatgtttctgtaggattctcaccgtggggctggaagaaaagagcatcgacttgatttctccaaccactcatccctctttttctttcttccaccactccccaccccagctgtagttaatttcagtgccttacaaatcctaagctcagagaaagttccatttccgttccagagggaagggaacctccctaggtccttccctggcttgttataacgcaaagcttggttgtttatgcaactctatcttaagaactgcccagcctcagctgaaaacccgaatctgagaaggaattgcgtcatgtaagggaagctggaattaagggagctgagccagtcatggttgtggcgtgtgagtcaggagacctaggtttcagcccctctctactgtcagcgagctgtgcaacgtgggcaagtcattgtcctctgagctgcagtttcctcatctgtcacatcgctacagacaagacctccctggaacccttctgattgtcttagacactgtggttgcaaaacccacggaaagcctcatttgtgtggaaagtcagaggaaaaatgatccagtggacacttggggattatctgtcattcaagatccttccttcaaccccaaggtcagctcccatctcatttccagaaaggctcatacctggcttgcagggaagcatctgtcttgtcattccaggtgccagaatcctctcagagtcattgaagggtgttcacccatcccacccaaggcttggcacactgccagtgtcttagcagggtcttgtgagggctgggggcatccaggcactcagaaggcaaaggaaccaccctacccatttggcctctggagggggcagaagaaagaaataaacctcatcctatattttacaaagcatgtgaattctggcattagctctcataggagacccatgtgcttccttgctcagtgcaaaactgatgattctacttgctgtagatgaatggttaacacgagctagttaaacagtgccattgttttgccagtgaagcctccaaccctaagccactgggacggtggccagagatgccagcagcctctgtcgcccttagtcatataaccaaaatccagaccttatccacaacccggggcttggaaaggaaggtattttggaatcacaccctccggttatgttgctccagtaaaatcttgcctggaaagaggcagtcttcttagcatggtgagctgagttcatggcttttttttgtagccagtcctgtccctggccatccatgtgatggttttggatggagttaaacttgatgccagtgggcagtgcatgtggaaagtatcagagtaaggctctcccctccagagccctgagtttcttggctgcatgaaggttttctttagaatcagaattgtagccagtttctttggccagaaggatgaatacttggatattactgaaagggaggggtggagatgggtgtggcagtgtatggtgtgtgatttttattttcttctttggtcatgggggccaaggagaaaggcatgaatcttccctgtcaggctcttacagccacaggcactgtgtctactgtctggaagacatgtccccatggctgtggggccgctgcttctgtttaaataaaagtggcctggaagctggc

SEQ ID NO: 200 - DNA, 1024 bp, Homo sapiens
gggtgacttggctggcgggatcaagtgcagctgcttcaggctgaggtggcagatagtgagcgctggtggcggagttaaagtcaaagcaggagagtaattatgaatagcgcagcgggattctcacacctagaccgtcgcgagcgggttctcaagttaggggagagtttcgagaagcagccgcgctgcgccttccacactgtgcgctatgacttcaaacctgcttctattgacacttcttctgaaggataccttgaggttggtgaaggtgaacaggtgaccataactctgccaaatatagaaggttcaactccaccagtaactgttttcaaaggttcaaaaaaaccttacttaaaagaatgcattttgattattaaccatgatactggagaatgtcggctagaaaaactcagcagcaacatcactgtaaaaaaaacaagagttgaaggaagcagtaaaattcagtatcgtaaagaacaacagcaacaacaaatgtggaattcagccaggactcccaatcttgtaaaacattctccatctgaagataagatgtccccagcatctccaatagatgatatcgaaagagaactgaaggcagaagctagtctaatggaccagatgagtagttgtgatagttcatcagattccaaaagttcatcatcttcaagtagtgaggatagttctagtgactcagaagatgaagattgcaaatcctctacttctgatacagggaattgtgtctcaggacatcctaccatgacacagtacaggattcctgatatagatgccagtcataatagatttcgagacaacagtggccttctgatgaatactttaagaaatgatttgcagctgagtgaatcaggaagtgacagtgatgactgaagaaatatttagctataaataaaaatttatacagcatgtataatttattttgtattaacaataaaaattcctaagactgagggaaatatgtcttaacttttgatgataaaagaaattaaatttgattcagaaatttcaaaaa

SEQ ID NO: 201 - DNA, 6063 bp, Homo sapiens
taagttggcgcgtcacctagacgtcagcctcttacctctcggacgtcccgtcccaggagcaaaactctagtgactttgggcccgcccccgtgagagtggagggcggccgatgagggcggttctgaagggaacaagaccaatgagacgagcccggggcggggcgcggggccggagggtggggcgggtggcggcggtggcagtccgaggtctggctccgcgcagtatatgacagtacgtcagcagcgggatggccctagcagtggcggcggctgcagaagcccaagcagccgcggccgcagtggaggctagagccggagcggcggcggcggcggcaccccggggagtttaagatggcggcgggggggacagggggcctgcgggaggagcagcgctatgggctgtcgtgcggacggctggggcaggacaacatcaccgtactgcatgtgaagctcaccgagacggcgatccgggcgctcgagacttaccagagccacaagaatttaattccttttcgaccttcaatccagttccaaggactccacgggcttgtcaaaattcccaaaaatgatcccctcaatgaagttcataactttaacttttatttgtcaaatgtgggcaaagacaaccctcagggcagctttgactgcatccagcaaacattctccagctctggagcctcccagctcaattgcctgggatttatacaagataaaattacagtgtgtgcaacaaacgactcgtatcagatgacacgagaaagaatgacccaggcagaggaggaatcccgcaaccgaagcacaaaagttatcaaacccggtggaccatatgtagggaaaagagtgcaaattcggaaagcacctcaagctgtttcagatacagttcctgagaggaaaaggtcaacccccatgaaccctgcaaatacaattcgaaagacacatagcagcagcaccatctctcagaggccatacagggacagggtgattcacttactggccctgaaggcctacaagaaaccggagctacttgctagactccagaaagatggtgtcaatcaaaaagacaagaactccctgggagcaattctgcaacaggtagccaatctgaattctaaggacctctcatataccttaaaggattatgtttttaaagagcttcaaagagactggcctggatacagtgaaatagacagacggtcattggagtcagtgctctctagaaaactaaatccgtctcagaatgctgcaggcaccagccgttcagaatctcctgtatgttctagtagagacgctgtatcttctcctcagaaacggcttttggattcagagtttattgatcctttaatgaataaaaaagcccgaatatctcacctgacgaacagagtaccaccaacactaaatggtcatttgaatcccaccagtgaaaaatctgctgcaggcctcccgctgccccctgcggctgctgccatccctacccctccaccgctgccttcaacctatctgcccatctcacatcctcctcagattgtaaattctaactccaactcccctagcactccagaaggccgggggactcaagacctacctgttgacagttttagtcaaaacgatagtatctatgaggaccagcaagacaaatatacctctaggacttctctggaaaccttaccccctggttccgttctactaaagtgtccaaagcctatggaagaaaaccattcaatgtctcacaaaaagtccaaaaagaagtctaaaaaacataaggaaaaggaccaaataaaaaagcacgacattgagactattgaggaaaaggaggaagatcttaagagagaagaggaaattgccaagctaaataactccagtccaaattccagtggaggagttaaagaggattgcactgcctccatggaaccttcagcaattgaactcccagattatttgataaaatatatcgctatcgtctcctatgagcaacgccagaattataaggatgacttcaatgcagagtatgatgagtacagagctttgcatgccaggatggagactgtagctagaagatttatcaaactagatgcacaaagaaagcgcctttctccaggctcaaaagagtatcagaatgttcatgaagaagtcttacaagaatatcagaagataaagcagtctagtcccaattaccatgaagaaaaatacagatgtgaatatcttcataacaagctggctcacatcaaaaggctaataggtgaatttgaccaacagcaagcagagtcatggtcctagaactctgcttggaccagaagatgtgaataaacttaagcttatttatttaaaattccaaatgagttgctctagattctaaaaaggtgaaactttggctgttgaaagtttcagtattagtaaacttgagttactttttcttttccattttactttgcttccctgcatttcgaagctgctctttctggtcctccccaccaccccacccccaagacttgtgtttgttaatagaaataatttttttaggtattggggatccattgtctatatttcaaatcagttttttttcctcaaaaacttgtgtttgttattagaaatgattttttagatattggggatccagtgtccacacttaaaagttgtatgtgtttaaaaaacaacaacagtaatgtgcaaggtgaaatgcttttggataaacgtaagcctattttctgacgtttcttaatgcaaactctttgccttaaatggtagaatatttagaaatttgcacaaaattaaaaaaataaacattgtcttggagggttaaaaaatagaaaggtgtatgtgtatagattcacatacacatatgtatatacaggctgacttgatctagaacattaaatccgccctgcaagttaaccccccattgcaatggttgccttaaggtgtttgctagttgtgtacatagtgtggttaatcattagctacactgcttcccacttgattagagcaatgggaagcatactgtggcctaccagcatctggaagtgtgtgctcgatctgtatgtgtgcagaggtggtgtggatgtgagcgtgcatgaaggaaaaaaagctgctactcctagtaggccaaacgctcaggttaaacaactgacgagtgttactgtagggtgtttttttgtttttttgttttttttcttctatcaaattgctacttttgttgtggaagacaaaagcatttccatttcaacgagtttgtcagctttattaatgttgggcaaaaattgatatgtcatgaaaatgaaacagatctatagttttgggacaaaattataaaatgaaatgtgtaggtaacctatttatatactgctataaagtattttttgaagagagatatgcaaagaagctattacctacataagaggtatatttaaagattttttttttcatcctggtgccaggaatataaaaaagagtggatatatttaaccataacatactgtgattcatcaaacagcacaaactttcatttcatggagtttatctgttgacattgatttaaactgtcacttgttttatcatgtgggaacataagttatgtggtcaaaaatataaggattttgaattaatgttgattcaagttgtattgtcttattgtattgtcttttcaaagtgctgccagttgaaaagggaagcattatgtttacaaatctgttttgaaatgtttgccaaaattttggtagtgtctttaataaagatgtttgtctccagcatccagaaaaataaatgaataactttgttgtgtatcactgtaaaccagaaaaatgttggttatctagaaaacttgagagagcatgtagattaacttttctctttggagttctaaaacattaactggaaagattagataatatactaaatgtatacagaagtatacagactatacaaagactgaaacaagtcccttttgcactacaactctataacattaccgcagaaattttggttctatgtagcatggacctcctaaggaattctgtttcttttagcattgagatccctggtgctctttttttacctcagaattggtacaatcattattaaacgttaatttatttcaaactttttaattgaaaaaaggaaagggaaacttaattggggataaattcaggcatcatattattatgatagagtctcctgagtggttcgtctataggtaatgaactcattggtgttatttcttggacatcttggccttttaatcaaagactgtgtgctgctatttgctatgagcaaggtttctcaaaagcaaaaggtgcttggaccatttggatcacctgagttagaatctctaggtatagggcccaagtatctgcattttcacaggtttcttgtaggtgactttctgcaagctaaagtatgagaaccattggcttggatgtagttctaaacttttaggtctgtaaatcttgaaatcttgaactgaaggtcaactattggcttttttttttttttaatgtccatcatgtcagcaggtgcaaatcacttttcccctttgcatgatctgaggcacctcctcagttgtttcactgccaactcttgtttcagaacctgtttacaaacaagccttccagttggtgaatggttagccattggagctcctaccctgtacatcagcacatcttctggtttacaagttgggtaacaatgaaagctggagatgctaaatggaaatccagcattgcatacccttagacctgatcacataccagtaaaagccttaatttagatgttagttgtatgtgttggacagatccttgcaaaagtgtgtctgtctattagttgtaaatttgaaaattataaatctctgaatctgctactatccaagtttcatcccttttgaagatgaggcatgagcctattaaaatatttataatcatttttcgtcccctactgcaagacttttagattcttacaaatgattactacaggaatagtggccacttaatgtcagttactccggtggaagaatttatctagttttttttcttttcttttttggaaggatggtgtgaaaaatagcaagattagagaatgagttgtatagttttttctatcacatttcatctaaaatgatttgaaggacttttgaagatttttaccaacatccttaaatcaactccaggttggatgaacaactgatttaaaacaaactaagagaacattaactagatgtgggctttttaaaatatataggtattgcatttcctaccttgttatttattccactttgaatactttagagggcttaactttcaactctttaaggtagtaatggatagttttatacttgttctcacaaaattgttatggtcagtttatatcattgctccatgcattgattataaaaattcagtattaattttttctgatcttataagctttataggagttttcttttctcttataaagtgtttcaccttatgtaaaacaaatgcctgcttgcatattggaagatgttgaaattagttttagacaaaagtggtccatcaattcagacactctgcttggatgccttacccttttcattagtgcattctttgcttctgaaacttggcagaaactcgttagccagtccactgcctttctgacaatgtgtggagtcacgtatgcttggtatatgcctttactacttttaaagttctacagtttattacttgcccaagtgttactaaatccttttcttatgtgtactggatggagaaaaaattatagccagcactttgagaggaaagttttcagaaacaatattaactggcactactaactgaaggccacaggagatgctatcaatgttatttgtaatctgaagattgaacaaggctgtgaggctcatttcaaactattttgaggtgttaaaatatatatatgctgtttctcagctgttccactcaaaccgtgttaggactctcaaaggtaaaatgtcacaggggcttttcagttgttacagagctcagcagctgtggttgcccctgttctacaccaatttcagttcaataaaaatgttaactttgcaaaaaaaaaaaaaaaaaaa

SEQ ID NO: 202 - DNA, 3951 bp, Homo sapiens
agaacaaactcctacctctgtttgcaactaagagttacatcccccatgccaagaccttccgaggcgtcccaaagggggaaattcctcgctgccggactgcgcccacccttgaggacctcacattctctttgggcagagcggaagccagacagagacagggactacgaagcgacaatccccagccctgtgtgtgcaaggagcccccgaggggcaggcagccacgctgcagaaggctagactctccgacccccagggagcctggtgtgggctgcagggacagaacgcttctcagaggaggttctctacttaaaagacaatgactactgatgaaggtgccaagaacaatgaagaaagccccacagccactgttgctgagcagggagaggatattacctccaaaaaagacaggggagtattaaagattgtcaaaagagtggggaatggtgaggaaacgccgatgattggagacaaagtttatgtccattacaaaggaaaattgtcaaatggaaagaagtttgattccagtcatgatagaaatgaaccatttgtctttagtcttggcaaaggccaagtcatcaaggcatgggacattggggtggctaccatgaagaaaggagagatatgccatttactgtgcaaaccagaatatgcatatggctcggctggcagtctccctaaaattccctcgaatgcaactctcttttttgagattgagctccttgatttcaaaggagaggatttatttgaagatggaggcattatccggagaaccaaacggaaaggagagggatattcaaatccaaacgaaggagcaacagtagaaatccacctggaaggccgctgtggtggaaggatgtttgactgcagagatgtggcattcactgtgggcgaaggagaagaccacgacattccaattggaattgacaaagctctggagaaaatgcagcgggaagaacaatgtattttatatcttggaccaagatatggttttggagaggcagggaagcctaaatttggcattgaacctaatgctgagcttatatatgaagttacacttaagagcttcgaaaaggccaaagaatcctgggagatggataccaaagaaaaattggagcaggctgccattgtcaaagagaagggaaccgtatacttcaagggaggcaaatacatgcaggcggtgattcagtatgggaagatagtgtcctggttagagatggaatatggtttatcagaaaaggaatcgaaagcttctgaatcatttctccttgctgcctttctgaacctggccatgtgctacctgaagcttagagaatacaccaaagctgttgaatgctgtgacaaggcccttggactggacagtgccaatgagaaaggcttgtataggaggggtgaagcccagctgctcatgaacgagtttgagtcagccaagggtgactttgagaaagtgctggaagtaaacccccagaataaggctgcaagactgcagatctccatgtgccagaaaaaggccaaggagcacaacgagcgggaccgcaggatatacgccaacatgttcaagaagtttgcagagcaggatgccaaggaagaggccaataaagcaatgggcaagaagacttcagaaggggtcactaatgaaaaaggaacagacagtcaagcaatggaagaagagaaacctgagggccacgtatgacgccacgccaaggagggaagagtcccagtgaactcggcccctcctcaatgggctttcccccaactcaggacagaacagtgtttaatgtaaagtttgttatagtctatgtgattctggaagcaaatggcaaaaccagtagcttcccaaaaacagcccccctgctgctgcccggagggttcactgaggggtggcacgggaccactccaggtggaacaaacagaaatgactgtggtgtggagggagtgagccagcagcttaagtccagctcatttcagtttctatcaaccttcaagtatccaattcagggtccctggagatcatcctaacaatgtggggctgttaggttttacctttgaactttcatagcactgcagaaacctttaaaaaaaaaatgcttcatgaatttctcctttcctacagttgggtagggtaggggaaggaggataagcttttgttttttaaatgactgaagtgctataaatgtagtctgttgcatttttaaccaacagaacccacagtagaggggtctcatgtctccccagttccacagcagtgtcacagacgtgaaagccagaacctcagaggccacttgcttgctgacttagcctcctcccaaagtccccctcctcagccagcctccttgtgagagtggctttctaccacacacagcctgtccctgggggagtaattctgtcattcctaaaacacccttcagcaatgataatgagcagatgagagtttctggattagcttttcctattttcgatgaagttctgagatactgaaatgtgaaaagagcaatcagaattgtgctttttctcccctcctctattccttttagggaataatattcaatacacagtacttcctcccagcattgctactgctcagcttcttctttcattctaatccttgctattaagaatttaagacttgtgcttacaatatttttgacctggagtggatctatttacatagtcatttaggatccatgcagctttttttgtctttttaagattattggctcataagcatatgtatactggtttatggaactttatttacactcctctatcatgcaaaaaaattttgactttttagtactaagcttaatttttaaaaacaaaatctgtagggttgacaaataaatagttgctcttctacactaggggtttcacctgcaggtttgacacgcagttgctcgcttttcctgccctgtcaagcttctctgttctggcgtgagttgtgaaagagttgaagacagcttcccatgccggtacacagccagtagcctaaatctccagtacttgagctgaccattgaactagggcaagtcttaaatgtgtacatgtagttgaatttcagtccttacgggtaaacagattgagcatggctctctattccctcagcctaagaaacactcatgggaatgcatttggcaacccaaggaaccatttgcttaaacctggaacatctcacctttttaaatcctaaaaaacactggcagttatattttaaattagtttttatttttatgatggttttatcaaaagacttttattattagattgggacccccttcaaacctaaaaatcaagttatttccttttataatacttttcttccccatggaacaaatgggatcaatttgtgagttttttcctttaatgataactaaaatccctctaatttctcatttatgcttttgtcttttttatgaaatatttcttttaaaagccccagtctcacctacgaaatatgaagagcaaaagctgattttgcttacttgctaaactgttgggaaagctctgtagagcatggttccagtgaggccaagattgaaatttgatactaaaaaggccacctagctttttgcagataacaaacaagaaagctattccaagactcagatgatgccagctgtctcccacgtgtgtattatggttcaccagggggaactggcaaaagtgtgtgtggggaggggaagggtgtgtgagtggttctgagcaaataactacagggtgcccattaccactcaagaagacacttcacgtattcttgtatcaaattcaataatcttaaacaatttgtgtagaagtccacagacatctttcaaccaccttttaggctgcatatggattgccaagtcagcatatgaggaattaaagacattgtttttaaaaaaaaaaaatcatttagatgcacttttttgtgtgttctttaaataaatccaaaaaaaatgtgacttccaaaaaaaaaaa

SEQ ID NO: 203 - DNA, 9454 bp, Homo sapiens
cacacagtgatttctgttatggcgattgggcggctgcagagaccaggactcagttcccctgccctagtctgagcctagtgggtgggactcagctcagagtcagttttccagaagcaggtttcagtgcagagttttcctacacttttcctgcgctagagcagcgagcagcctggaacagacccaggcggaggacacctgtgggggagggagcgcctggaggagcttagagaccccagccgggcgtgatctcaccatgtgcggatttgcgaggcgcgccctggagctgctagagatccggaagcacagccccgaggtgtgcgaagccaccaagactgcggctcttggagaaagcgtgagcagggggccaccgcggtctccgcgcctgtctgcaccctgtcgcctgagctgcctgacagtgacaatgacatcccagttaccagtgtccttgaattgatagtggcttctgtttgtcagtctcatataagaactacagctcatcaggaggagatcgcagcagggtaagagacaccaacaccatgttctgcacgaagctcaaggatctcaagatcacaggagagtgtcctttctccttactggcaccaggtcaagttcctaacgagtcttcagaggaggcagcaggaagctcagagagctgcaaagcaaccgtgcccatctgtcaagacattcctgagaagaacatacaagaaagtcttcctcaaagaaaaaccagtcggagccgagtctatcttcacactttggcagagagtatttgcaaactgattttcccagagtttgaacggctgaatgttgcacttcagagaacattggcaaagcacaaaataaaagaaagcaggaaatctttggaaagagaagactttgaaaaaacaattgcagagcaagcagttgcagcaggagttccagtggaggttatcaaagaatctcttggtgaagaggtttttaaaatatgttacgaggaagatgaaaacatccttggggtggttggaggcacccttaaagattttttaaacagcttcagtacccttctgaaacagagcagccattgccaagaagcaggaaaaaggggcaggcttgaggacgcctccattctatgcctggataaggaggatgattttctacatgtttactacttcttccctaagagaaccacctccctgattcttcccggcatcataaaggcagctgctcacgtattatatgaaacggaagtggaagtgtcgttaatgcctccctgcttccataatgattgcagcgagtttgtgaatcagccctacttgttgtactccgttcacatgaaaagcaccaagccatccctgtcccccagcaaaccccagtcctcgctggtgattcccacatcgctattctgcaagacatttccattccatttcatgtttgacaaagatatgacaattctgcaatttggcaatggcatcagaaggctgatgaacaggagagactttcaaggaaagcctaattttgaagaatactttgaaattctgactccaaaaatcaaccagacgtttagcgggatcatgactatgttgaatatgcagtttgttgtacgagtgaggagatgggacaactctgtgaaaaaatcttcaagggttatggacctcaaaggccaaatgatctacattgttgaatccagtgcaatcttgtttttggggtcaccctgtgtggacagattagaagattttacaggacgagggctctacctctcagacatcccaattcacaatgcactgagggatgtggtcttaataggggaacaagcccgagctcaagatggcctgaagaagaggctggggaagctgaaggctacccttgagcaagcccaccaagccctggaggaggagaagaaaaagacagtagaccttctgtgctccatatttccctgtgaggttgctcagcagctgtggcaagggcaagttgtgcaagccaagaagttcagtaatgtcaccatgctcttctcagacatcgttgggttcactgccatctgctcccagtgctcaccgctgcaggtcatcaccatgctcaatgcactgtacactcgcttcgaccagcagtgtggagagctggatgtctacaaggtggagaccattggcgatgcctattgtgtagctgggggattacacaaagagagtgatactcatgctgttcagatagcgctgatggccctgaagatgatggagctctctgatgaagttatgtctccccatggagaacctatcaagatgcgaattggactgcactctggatcagtttttgctggcgtcgttggagttaaaatgccccgttactgtctttttggaaacaatgtcactctggctaacaaatttgagtcctgcagtgtaccacgaaaaatcaatgtcagcccaacaacttacagattactcaaagactgtcctggtttcgtgtttacccctcgatcaagggaggaacttccaccaaacttccctagtgaaatccccggaatctgccattttctggatgcttaccaacaaggaacaaactcaaaaccatgcttccaaaagaaagatgtggaagatggcaatgccaattttttaggcaaagcatcaggaatagattagcaacctatatacctatttataagtctttggggtttgactcattgaagatgtgtagagcctctgaaagcactttagggattgtagatggctaacaagcagtattaaaatttcaggagccaagtcacaatctttctcctgtttaacatgacaaaatgtatgtactcacttcagtacttcagctcttcaagaaaaaaaaaaaaaaccttaaaaagctacttttgtgggagtatttctattatataaccagcacttactacctgtactcaaaattcagcaccttgtacatatatcagataattgtagtcaattgtacaaactgatggagtcacctgcaatctcatatcctggtggaatgccatggttattaaagtgtgtttgtgatagtgtcgtcaaaaaaaaggtttttgaatagaaattacattctttgacaccctcagttctttcaaactttcaactctgcattttattgcattttctcatttaactgttagtatatgtttgaatataggctgactttttttctctattgcactttcttctttttttctttttagaaaataagcaattaggggttagatgcaatatgaatataaaatagttctgtaaataccaaatattatttttagttctggaagttaaaaatactctccatagtaacgtgtgttataataataaatatttcttttgtttgacttttttaaaattctacaatggtaaaagctattttaatccatgttagcaatttaattcctattaattcattttactatcataatagcaaagtattcagaataaaagaggtttatatcttctattaaaatgcagtaatactattcaaatctaatttagctggaagcaacatgggagtaaagtaatcatccaggggacccaccataaaggacattggtaaaacatttacacacgtaaacacacgtgcaggcacacttggaacaatatggacccacttcagcagacatcttctattgccatgctgagctgtttaaagttttaagaagaaaatctaagtatggaagtagaaaataagacttgttcttttggtggatatctcatttttcttgagtatttgtgctgaacattttggtgtatgtctatgaactaagaatcaagtttttgtctcattaaatatacatatatgaagtgtttttattctacttgaaatatcttgacttaaaaaaaacgactgttagtattgatgaagcaaatgaggcagtgactacattatggaaatgtctaagtattttttccggaacttcaactttttctttttgttttacataaacatttaagcagctaggaacttttagttttagttaggtcagttgaagttctctggtgaactaaaaaatctacattttggttggggataaagatttgattttaaaaacagcttgaatttaaagcaagaaaaagatgaacgttatagttttaaaatcaatattagcagagccatagataggctgagctcttatttggggttctgagaaataactcagtttaaaacttctttaactgcctcccttagtacccaggctagcccatggtgacatcagggatattcattactgattggcctctagtattccaagggtactactatagatattacaatgatgctgtttactaagtgataaccccgtatcttacaggactgactttgactcaataaaccactcagcctattattggaaagtgccataggccttgagaaagtatagttacatcctcacaaatatatgaagttaagtcactacttacaaggaaaaaaaatgtaaatacatttttctttctggaaccgaactcttattatggggaaataatagaaataaagaaaatgtaaaagcatgaaatggaatgtagtcttgatcaaacatttcagcagacctcaatttgcttacaatctgtactcaaaaagtttataattcaatcagaattcaaaaagtattttgtgtgtttgtgatgtattagcatatacacaaaacaaatgaggggaatgtatataatcttggtgaaaagttgtatgggagttttttgtacgattcctgcaacttttctataaacgtggcattatatctaaataaaaaattaccaaaaaacatattttcacagtgaagttaaatcatctgtgataggttccccagaccagcctacaaaggcccattaaatacagaataatttgtggatcttcaaagaggatgaacatacatttccatgacagagtccatacgaaattcacaatttagatgctaaaaaatttaaggaatatctttttttctctatcttatctgctttgaagcatagcgattagcgagaaacttttcagatccagaccactgatggtagccagagtagagaccctggagcatagattcttaaaataaataaggggcccaagtcagagctttgaggtattgaagatggaaaaatagtggacaaacagcctgtaatcaggttggggattacgggtactgagttatgttgccatttaactattctaaaaaataagactgggtctcaagactgcttccctaacagactgtttctcctgaaaatgcaggagctattctttctgttctggttatatagtttccattcatggcttcttgtcctgttgttttttgtgtcgagtacactatataaattatctccttatacatatttctcaggcaagcacagagttatactgaacttttctaaagatgctttgcatcaagaagcaaagggaaatacagaattaaaatgtttctttccattttgctttgtttttctatatcgatctagactttgtaggaaaatgcaaagcgtatatttaagaaaacctaaataagaatagattcatttactcattttcatttattcattcatgaagaatttattgaatgcctactatgtgccaggaatattgctatatttttgaaatttaaggataaaatatggcccaatctatcaagaaaggaaagtgaaagacaaatgtaagacataattacaacattctgtgggagcacaaagtaggggactcagttcttagagaagtcttttggtcttagagttcatcaagcagagaaggggaaggacatggtccaggaaaataaatcagcacacaaagagatggggtcttgagggtgcatagtacattctggacagccagttacctgggatgagttgggagggaggagaataaggacaaaagaccatctgggcaaaaatcacgaaggggtatgtgtgtcatgtaaaggtgtgccatgatagttattcatattgctattgtaatattaatatatagtaattaactacacatgacacagctttacatgaccttaagtagttatcaacattaccataatagtaatattaataactacaataagagccattattattcacttgaggcacttgttcaaaatagattttacaaaagaaaaaaaaaaaagaagcaacatgagtaaaattagatccattggctactgactccctctccaacagttttaaagctactagataagagaagcatcaagtcttaaaggaagagaatggtatgatcagatgtgtgttttccaaagactattagaaacagcatggttaaggatagggtggatatttacttgcacaggtgactgaatgaacatctgtttatacatcaagggaaaatgattcattttatatcctggatattttaccataagtatgagcataaagctgggatgtctggcattggaattttatgtcactctcaaggctaattagtctttcagatcctttggtagggaggaaagaagagttgcttcagcattttgactaacatttcttccaaatttcttctccctgatatttccagccacgccaaggcaaagacttcccagctctgtctcaggttaggttaaaagaaggcataggatggaagagggtggtctgtggtaggcctagcaaatgaaagagatgaataaacaagagtgtctagtctaactagtgcctgaggaatagacatcagtcctctgagattacccagctggaaaactgcccagatggagctttacatgcaaagctccagtgaagtctagtgctgtataatgctttaaatccacaatcaagcccttgttgatgcaaatgttagtcgcccaaagcagaatgggttaacgaattactgcagtggttttaggtgcatgggtttgacccatgtaaatcattttaataagtaaaattgaatctttgatacatatttgttgaggagcttgtcagatcactacctttcactgaacagtaaaacatggatcatttatttcacctcattttgcacttcaatgcaatttcactctttaggtggttgtacttggacagttaaatgaagactgtctttaagggtgcagggatggagaacacagcatatatgagaggtgggagggcagagacgccttgcgattcctgtgaggagggacttaccgtctcctccaaaacagaaattcagtgctgcagagacggtagcaaagtgcagttctcttgttaaaacacaggctaaaagcagtgactgcttaacttattaagcagagaaaaccaaaatgtcattttcaaccaaaattgagtgttagagtttatggtctctgttatgatacttttcaagacctgggaaatatttgtatcctttagtgaaaaggggaagaatcaattactgaaagccataagcttacagtaacggagccaattaatcctttgtcatctttgttgagtttagttttcttctgttcttagcacgtcagctagtagatctttgatgaactgttgctcctctttaaatgtttcttttattatattgatgatgtgcactcattcagtattcttattttaagctgcagtaatcactgtacatttgattgccatctgtacttcccttgaagcagctttgcttattacagccacacctgcatctgttttgactagcccacataacctacacatttttcatccaaagctatcccattaccttatttatgtccatttattttcatatatagtatctgccaaaatagtagcaaaagttttatcaatgtgtagatttcaatcagaaaaacctaagcaaaaggaaaaaaaagtgatattctaaaagccacacttcttttatcaccagtgcagttttttccatcatcataaacttagttttatgaaaatgttaatatcttggatttaaacattggggtagaaatcaggacaaaatttaaatgtcatatccaggacttaatctcagatattctggtagaagatatttagataaggttgtggctgcctgtcaagttttttaattttttaaattatataatgtcagaaaattaaatcacaaatgagccttccagattgtgaggaaaattacttggctgaaaatgactttgcataatgcccaaatcttgaagtatctgctcagatgtttgttccatctgaaatgctgccaaatccatctgtattgaggaaagagctatgaggtagtttcagagaaagtgaaaacaaaacaaagcaaaacaaaaatgctattacagaagttggacagcccaatgtgttaagtattatacacctggaacaagagcagcaaaactgaagctctttggaaagttatggcaacagtggtctgggaattctgggcctttagaaataatcattcccagtgatacagggatgtgcagcatccagacactgcttaatcacagtgagctgccgtcttccctgaataagttgtatcttataacattgaagtgaatgaaaatgtattagtatttgagaatttactattccttcacctccttgcacatgtaaattaaagatgttttggaaaatatgagaacttgatgttcactgccctagagcactattctccaaccttttagattcctgcaatctgttaataaaatattgtaggacaacaactctatagactgatacatgctgctctcaatccatatactacatattaggacagcttttcttttctaaatgagcatgaatataaatagaaattctagtattttcttcacctaccccagtgaatcatctttatattttacttgggaaactgctacagttggctagtgggtcttcacttttattgctttgagaaatggataaaagacatagactatcacccctccaaaaatgtgcatatggccccatacaagacacatgtactgccagagcttggggaactccctagaatctactcctagaccaccctagtgaagtaccatagaccatattgtctagatgggacaaaataataaattttgactaagaacttactgtttagagagaaaaaatagtaaataatgttcaaaatgagaagacaataactgacaagtctgtgatttttgggttagatgagaccacttttgatttttgaggaataaaaggagttagttttttggtcctgatgtgtaaaatgattcatggggtttcacatacagacaagtagttttcttttcagcaaatatttaacatatctctcaatatatttttcaccagtttttggtaaatatgcattgctataggtataccaagttttttttgttatgtttagtaactaatttcattttttctgtatatgtaaatatagctattggaccctgcattgaaaaccttcttagtactaacaacactccttttattattaccttcatagttactttaaatgacatatttatttcgagttttacttctggctgagttgcaaagtctatgagaatgttacctcctgtctcagaagcttgttagttattgtgccacctaaatattgtaataaaagtgtttaaataaaaatcttcttaaaatttaaaatgaaaaaaaaaaaaaaa

SEQ ID NO: 204 - DNA, 2855 bp, Homo sapiens
agccccaaactcaccacctggccgtggacacctgtgtcagcatgtgggacctggttctctccatcgccttgtctgtggggtgcactggtgccgtgcccctcatccagtctcggattgtgggaggctgggagtgtgagaagcattcccaaccctggcaggtggctgtgtacagtcatggatgggcacactgtgggggtgtcctggtgcacccccagtgggtgctcacagctgcccattgcctaaagaagaatagccaggtctggctgggtcggcacaacctgtttgagcctgaagacacaggccagagggtccctgtcagccacagcttcccacacccgctctacaatatgagccttctgaagcatcaaagccttagaccagatgaagactccagccatgacctcatgctgctccgcctgtcagagcctgccaagatcacagatgttgtgaaggtcctgggcctgcccacccaggagccagcactggggaccacctgctacgcctcaggctggggcagcatcgaaccagaggagttcttgcgccccaggagtcttcagtgtgtgagcctccatctcctgtccaatgacatgtgtgctagagcttactctgagaaggtgacagagttcatgttgtgtgctgggctctggacaggtggtaaagacacttgtgggggtgattctgggggtccacttgtctgtaatggtgtgcttcaaggtatcacatcatggggccctgagccatgtgccctgcctgaaaagcctgctgtgtacaccaaggtggtgcattaccggaagtggatcaaggacaccatcgcagccaacccctgagtgcccctgtcccacccctacctctagtaaatttaagtccacctcacgttctggcatcacttggcctttctggatgctggacacctgaagcttggaactcacctggccgaagctcgagcctcctgagtcctactgacctgtgctttctggtgtggagtccagggctgctaggaaaaggaatgggcagacacaggtgtatgccaatgtttctgaaatgggtataatttcgtcctctccttcggaacactggctgtctctgaagacttctcgctcagtttcagtgaggacacacacaaagacgtgggtgaccatgttgtttgtggggtgcagagatgggaggggtggggcccaccctggaagagtggacagtgacacaaggtggacactctctacagatcactgaggataagctggagccacaatgcatgaggcacacacacagcaaggatgacgctgtaaacatagcccacgctgtcctgggggcactgggaagcctagataaggccgtgagcagaaagaaggggaggatcctcctatgttgttgaaggagggactagggggagaaactgaaagctgattaattacaggaggtttgttcaggtcccccaaaccaccgtcagatttgatgatttcctagcaggacttacagaaataaagagctatcatgctgtggtttattatggtttgttacattgatgggatacatactgaaatcagcaaacaaaacagatgtatagattagagtgtggagaaaacagaggaaaacttgcagttacgaagactggcaacttggctttactaagttttcagactggcaggaagtcaaacctattaggctgaggaccttgtggagtgtagctgatccagctgatagaggaactagccaggtgggggcctttccctttggatggggggcatatctgacagttattctctccaagtggagacttacggacagcatataattctccctgcaaggatgtatgataatatgtacaaagtaattccaactgaggaagctcacctgatccttagtgtccaaggtttttactgggggtctgtaggacgagtatggagtacttgaataattgacctgaagtcctcagacctgaggttccctagagttcaaacagatacagcatggtccagagtcccagatgtacaaaaacagggattcatcacaaatcccatctttagcatgaagggtctggcatggcccaaggccccaagtatatcaaggcacttgggcagaacatgccaaggaatcaaatgtcatctcccaggagttattcaagggtgagccctttacttgggatgtacaggctttgagcagtgcagggctgctgagtcaaccttttattgtacaggggatgagggaaagggagaggatgaggaagcccccctggggatttggtttggtcttgtgatcaggtggtctatggggctatccctacaaagaagaatccagaaataggggcacattgaggaatgatactgagcccaaagagcattcaatcattgttttatttgccttcttttcacaccattggtgagggagggattaccaccctggggttatgaagatggttgaacaccccacacatagcaccggagatatgagatcaacagtttcttagccatagagattcacagcccagagcaggaggacgctgcacaccatgcaggatgacatgggggatgcgctcgggattggtgtgaagaagcaaggactgttagaggcaggctttatagtaacaagacggtggggcaaactctgatttccgtgggggaatgtcatggtcttgctttactaagttttgagactggcaggtagtgaaactcattaggctgagaaccttgtggaatgcagctgacccagctgatagaggaagtagccaggtgggagcctttcccagtgggtgtgggacatatctggcaagattttgtggcactcctggttacagatactggggcagcaaataaaactgaatcttgttttcagaccttaaaaaaaaaaaaaaaaaaaaa

SEQ ID NO: 205 - DNA, 1099 bp, Homo sapiens
agccccaagcttaccacctgcacccggagagctgtgtcaccatgtgggtcccggttgtcttcctcaccctgtccgtgacgtggattggtgagaggggccatggttggggggatgcaggagagggagccagccctgactgtcaagctgaggctctttcccccccaacccagcaccccagcccagacagggagctgggctcttttctgtctctcccagccccactccaagcccatacccccagcccctccatattgcaacagtcctcactcccacaccaggtccccgctccctcccacttaccccagaactttctccccattgcccagccagctccctgctcccagctgctttactaaaggggaagttcctgggcatctccgtgtttctctttgtggggctcaaaacctccaaggacctctctcaatgccattggttccttggaccgtatcactggtccacctcctgagcccctcaatcctatcacagtctactgacttttcccattcagctgtgagtgcccaaccctatcccagagaccttgatgcttggcctcccaatcttgccctaggatacccagatgccaaccagacacctccttcttcctagccaggctatctggcctgagacaacaaatgggtccctcagtctggcaatgggactctgagaactcctcattccctgactcttagccccagactcttcattcagtggcccacattttccttaggaaaaacatgagcatccccagccacaactgccagctctctgattccccaaatctgcatccttttcaaaacctaaaaacaaaaagaaaaacaaataaaacaaaaccaactcagaccagaactgttttctcaacctgggacttcctaaactttccaaaaccttcctcttccagcaactgaacctcgccataaggcacttatccctggttcctagcaccccttatcccctcagaatccacaacttgtaccaagtttcccttctcccagtccaagaccccaaatcaccacaaaggacccaatccccagactcaagatatggtctgggcgctgtcttgtgtctcctaccctgatccctgggttcaactctgctccca

SEQ ID NO: 206 - DNA, 3808 bp, Homo sapiens
caggtgatttttggtggggcggggacatgaaaaaaaagttaaaatgtccttataaagacaaaatctttttctttcctggctgatgatttgtcattctagtcacttcctgccttgtgaccacacacccaggcttgacaaagctgttctgcagatcagaaagaaggggttcctggtcatacaccagtactaccaaggacagcttttttcctgcaagatctgttacctaaagcaataaaaaatggccagaggatcagtgtccgatgaggaaatgatggagctcagagaagcttttgccaaagttgatactgatggcaatggatacatcagcttcaatgagttgaatgacttgttcaaggctgcttgcttgcctttgcctgggtatagagtacgagaaattacagaaaacctgatggctacaggtgatctggaccaagatggaaggatcagctttgatgagtttatcaagattttccatggcctaaaaagcacagatgttgccaagacctttagaaaagcaatcaataagaaggaagggatttgtgcaatcggtggtacttcagagcagtctagcgttggcacccaacactcctattcagaggaagaaaagtatgcctttgtcaactggataaacaaagccctggaaaatgatcctgattgtcggcatgtcatcccaatgaacccaaacacgaatgatctctttaatgctgttggagatggcattgtcctttgtaaaatgatcaacctgtcagtgccagacacaattgatgaaagaacaatcaacaaaaagaagctaacccctttcaccattcaggaaaatctgaacttggctctgaactctgcctcagccatcgggtgccatgtggtcaacataggggctgaggacctgaaggaggggaagccttatctggtcctgggacttctgtggcaagtcatcaagattgggttgtttgctgacattgaactcagcagaaatgaagctctgattgctcttttgagagaaggtgagagcctggaggatttgatgaaactctcccctgaagagctcttgctgaggtgggctaattaccacctggaaaatgcaggctgcaacaaaattggcaacttcagtactgacatcaaggactcaaaagcttattaccacctgcttgagcaggtggctccaaaaggagatgaagaaggtgttcctgctgttgttattgacatgtcaggactgcgggagaaggatgacatccagagggcagaatgcatgctgcagcaggcggagaggctgggctgccggcagtttgtcacagccacagatgttgtccgagggaaccccaagttgaacttggcttttattgccaacctctttaacagataccctgccctgcacaaaccagagaaccaggacattgactggggggctcttgaaggtgagacgagagaagagcggacatttaggaactggatgaactccctgggtgttaaccctcgagtcaatcatttgtacagtgacttatcagatgccctggtcatcttccagctctatgaaaagatcaaagttcctgttgactggaacagagtaaacaaaccgccataccccaaactgggaggcaatatgaagaagcttgagaattgtaactacgcggtagaattggggaagaatcaagcgaagttctccctggttggcatcggtggacaagatctcaatgaaggaaaccgcactctcacactggccttgatttggcagctaatgagaaggtatacactgaatatcctcgaagaaattggtggtggccagaaggtcaatgatgacattattgtcaactgggtgaatgaaacattgagggaagcaaagaaaagttcatccatctctagtttcaaggacccgaagattagtacaagtctgcctgttctggacctcatcgatgccatccaaccaggttccattaactatgaccttctgaagacagaaaatctgaatgatgatgagaaactcaacaatgcaaaatatgccatctctatggcccgaaaaattggagcaagagtgtatgccctgccagaagacctggttgaagtgaaccccaaaatggtcatgaccgtgtttgcctgcctcatggggaaaggaatgaagagggtgtgaggcccaatggggctgggtgggaggcggtgcactcactcctgactgcccggcacagatgctccagggatgattcaagccattccaaagttcaacttggtgacactctataagattccaaaaagcacatattagtgcagccaagtagcctctcctgtatttaacaaaaagtgcttcattctttgcaggaggcccaacctcctatatataggtttctattcttgatttatttgcttcttcgaaaatctagaggaaaagaaagaagttattttccaggtacccttctcgcttttgccattagccaaggatagaagctgcagtggtattaattttgatataatctttcaaaccagcttcatgtggcttcccttttctttgttcaagatgagggccaggaggggaaacatcacacctgccctaaaccctgttcctggaggtcagcatttgatctgttgcaagcccctctttctgtcccctcttcctaccctgcctcccttgactttgctcctcacacttttggaaccatgccttccgggggggcccatctcttctggccgtccttgtctctgggccacttggagtgtgtgataaatcagtcaagctgttgaagtctcaggagtctctggtagcctgcagaagtaagcctcatcatcagagcctttcctcaaaactggagtcccaaatgtcatcaggttttgttttttttcagccactaagaacccctctgcttttaactctagaatttgggcttggaccagatctaacatcttgaatactctgccctctagagccttcagccttaatggaaggttggatccaaggagggtgtaatggagcatcaagccactcggcggcagcatggagctataactaagcatcctttagggttctgcctctccaggcatttagccctcacattagatctagttactgtggtatggctaatacctgtcaacatttggaggcaatcctaccttgcttttgcttctagagcttagcatatctgattgttgtcaggccatattatcaatgtttacttttttggtactataaaagctttctgccacccctaaactccaggggggacaatatgtgccaatcaatagcacccctactcacatacacacacacctagccagctgtcaagggcagaatgaatctatgctggataagaaatggtggaactgcgttatgaagagctaatttactggacaaagaattccaaagcaaaaccagaacagtatgaatttgagcaggtctcataggttgagcaatttccccctaaaccaactgaaggctaaaaagcaacaggccattgtgaaccaatgcaagacgccctctatcatggtgaaaagctccatcaatgaggtatcttctttagtggtggtatgtaatggaacttagccatttttcaaagcaattgaaatgcattgctctggatctgttccttggcagtggactcagaaagccaacatgtggctcctcccagcccataaccagtatttttgctgcttctgaatacaaattggttggttttgacttcagattgaacttactgtagcctcagatgatttcccccctccgcctccaggaagaaagaatgttactgccttaataaaaaatgaaaagagaatgatgctcaaaatctttccaaataaaatgttccctataaaaaaaaaaaaaaaaaaa

SEQ ID NO: 207 - DNA, 4812 bp, Homo sapiens
gcgctccagacaagatggcgcggccggtccggggagggctcggggccccgcgccgctcgccttgccttctccttctctggctgcttttgcttcggctggagccggtgaccgccgcggccggcccgcgggcgccctgcgcggccgcctgcacttgcgctggggactcgctggactgcggtgggcgcgggctggctgcgttgcccggggacctgccctcctggacgcggagcctaaacctgagttacaacaaactctctgagattgaccctgctggttttgaggacttgccgaacctacaggaagtgtacctcaataataatgagttgacagcggtaccatccctgggcgctgcttcatcacatgtcgtctctctctttctgcagcacaacaagattcgcagcgtggaggggagccagctgaaggcctacctttccttagaagtgttagatctgagtttgaacaacatcacggaagtgcggaacacctgctttccacacggaccgcctataaaggagctcaacctggcaggcaatcggattggcaccctggagttgggagcatttgatggtctgtcacggtcgctgctaactcttcgcctgagcaaaaacaggatcacccagcttcctgtaagagcattcaagctacccaggctgacacaactggacctcaatcggaacaggattcggctgatagagggcctcaccttccaggggctcaacagcttggaggtgctgaagcttcagcgaaacaacatcagcaaactgacagatggggccttctggggactgtccaagatgcatgtgctgcacctggagtacaacagcctggtagaagtgaacagcggctcgctctacggcctcacggccctgcatcagctccacctcagcaacaattccatcgctcgcattcaccgcaagggctggagcttctgccagaagctgcatgagttggtcctgtccttcaacaacctgacacggctggacgaggagagcctggccgagctgagcagcctgagtgtcctgcgtctcagccacaattccatcagccacattgcggagggtgccttcaagggactcaggagcctgcgagtcttggatctggaccataacgagatttcgggcacaatagaggacacgagcggcgccttctcagggctcgacagcctcagcaagctgactctgtttggaaacaagatcaagtctgtggctaagagagcattctcggggctggaaggcctggagcacctgaaccttggagggaatgcgatcagatctgtccagtttgatgcctttgtgaagatgaagaatcttaaagagctccatatcagcagcgacagcttcctgtgtgactgccagctgaagtggctgcccccgtggctaattggcaggatgctgcaggcctttgtgacagccacctgtgcccacccagaatcactgaagggtcagagcattttctctgtgccaccagagagtttcgtgtgcgatgacttcctgaagccacagatcatcacccagccagaaaccaccatggctatggtgggcaaggacatccggtttacatgctcagcagccagcagcagcagctcccccatgacctttgcctggaagaaagacaatgaagtcctgaccaatgcagacatggagaactttgtccacgtccacgcgcaggacggggaagtgatggagtacaccaccatcctgcacctccgtcaggtcactttcgggcacgagggccgctaccaatgtgtcatcaccaaccactttggctccacctattcacataaggccaggctcaccgtgaatgtgttgccatcattcaccaaaacgccccacgacataaccatccggaccaccaccatggcccgcctcgaatgtgctgccacaggtcacccaaaccctcagattgcctggcagaaggatggaggcacggatttccccgctgcccgtgagcgacgcatgcatgtcatgccggatgacgacgtgtttttcatcactgatgtgaaaatagatgacgcaggggtttacagctgtactgctcagaactcagccggttctatttcagctaatgccaccctgactgtcctagagaccccatccttggtggtccccttggaagaccgtgtggtatctgtgggagaaacagtggccctccaatgcaaagccacggggaaccctccgccccgcatcacctggttcaagggggaccgcccgctgagcctcactgagcggcaccacttgacccctgacaaccagctcctggtggttcagaacgtggtggcagaggatgcgggccgatatacctgtgagatgtccaacaccctgggcacggagcgagctcacagccagctgagcgtcctgcccgcagcaggctgcaggaaggatgggaccacggtaggcatcttcaccattgctgtcgtgagcagcatcgtcctgacgtcactggtctgggtgtgcatcatctaccagaccaggaagaagagtgaagagtacagtgtcaccaacacagatgaaaccgtcgtgccaccagatgttccaagctacctctcttctcaggggaccctttctgaccgacaagaaaccgtggtcaggaccgagggtggccctcaggccaatgggcacattgagagcaatggtgtgtgtccaagagatgcaagccactttccagagcccgacactcacagcgttgcctgcaggcagccaaagctctgtgctgggtctgcgtatcacaaagagccgtggaaagcgatggagaaagctgaagggacacctgggccacataagatggaacacggtggccgggtcgtatgcagtgactgcaacaccgaagtggactgttactccaggggacaagccttccacccccagcctgtgtccagagacagcgcacagccaagtgcgccaaatggcccggagccgggtgggagtgaccaagagcattctccacatcaccagtgcagcaggactgccgctgggtcctgccccgagtgccaagggtcgctctaccccagtaaccacgatagaatgctgacggctgtgaagaaaaagccaatggcatctctagatgggaaaggggattcttcctggactttagcaaggttgtatcacccggactccacagagctacagcctgcatcttcattaacttcaggcagtccagagcgcgcggaagcccagtacttgcttgtttccaatggccacctccccaaagcatgtgacgccagtcccgagtccacgccactgacaggacagctccccgggaaacagagggtgccactgctgttggcaccaaaaagctaggttttgtctacctcagttcttgtcataccaatctctacgggaaagagaggtaggagaggctgcgaggaagcttgggttcaagcgtcactcatctgtacatagttgtaactcccatgtggagtatcagtcgctcacaggacttggatctgaagcacagtaaacgcaagaggggatttgtgtacaaaaggcaaaaaaagtatttgatatcattgtacataagagttttcagagatttcatatatatcttttacagaggctattttaatctttagtgcatggttaacagaaaaaaattatacaattttgacaatattatttttcgtatcaggttgctgtttaattttggagggggtggggaaatagttctggtgccttaacgcatggctggaatttatagaggctacaaccacatttgttcacaggagtttttggtgcggggtgggaaggatggaaggccttggatttatattgcacttcatagacccctaggctgctgtgcggtgggactccacatgcgccggaaggagcttcaggtgagcactgctcatgtgtggatgcccctgcaacaggcttccctgtctgtagagccaggggtgcaagtgccatccacacttgcagtgaatggcttttccttttaggtttaagtcctgtctgtctgtaaggcgtagaatctgtccgtctgtaaggcgtagaatgagggttgttaatccatcacaagcaaaaggtcagaacagttaaacactgcctttcctcctcctcttattttatgataaaagcaaatgtggccttctcagtatcattcgattgctatttgagacttttaaattaaggtaaaggctgctggtgttggtacctgtggatttttctatactgatgttttcgttttgccaatataatgagtattacattggccttgggggacagaaaggaggaagttctgacttttcagggctaccttatttctactaaggacccagagcaggcctgtccatgccattccttcgcacagatgaaactgagctgggactggaaaggacagcccttgacctgggttctgggtataatttgcacttttgagactggtagctaaccatcttatgagtgccaatgtgtcatttagtaaaacttaaatagaaacaaggtccttcaaatgttcctttggccaaaagctgaagggagttactgagaaaatagttaacaattactgtcaggtgtcatcactgttcaaaaggtaagcacatttagaattttgttcttgacagttaactgactaatcttacttccacaaaatatgtgaatttgctgcttctgagaggcaatgtgaaagagggagtattacttttatgtacaaagttatttatttatagaaattttggtacagtgtacattgaaaaccatgtaaaatattgaagtgtctaacaaatggcattgaagtgtctttaataaaggttcatttataaatgtcaaaaaaaaaaaaaaaaaaaaaaaaaaaaaaaaaaaaaaaaaaaaaaaaaaa

SEQ ID NO: 208 - DNA, 3520 bp, Homo sapiens
gcgggggcggggccgcggcgcctataaagtcgccctccgcccggacgtaaacaaacctcgcctggctcccagctggtgctgaagctcgtcagttcaccatccgccctcggcttccgcggggcgctgggccgccagcctcggcaccgtcctttcctttctccctcgcgttaggtaagcccgcgccctcttctcccaggcgcgacgcggagcagaaaggggccgcccgtgcggtgccgctggagcgccaggaccgccctttgtagccccgcgtactccaggagtaagcgccccggagctgcaagtgcgcggtcaccccggggcgcgggcgcgagggggctttgggtgcagacaccgctgaagtggggggttcaattacggaaagggaggaaaaaaagacagggtcccattcatctcccccctagctggggattggggttctggaggtcgggaagggggcgatgagacggtccgaaaaaataccaggatagcgtttcctggcgtcgtctccgaatcccagctggcgccgctggcaggggtgcgcgctggacgtgggtgcagaagggactaggcaggtgacagcagggacatgtctcgggagatgcaggatgtagacctcgctgaggtgaagcctttggtggagaaaggggagaccatcaccggcctcctgcaagagtttgatgtccaggagcaggacatcgagactttacatggctctgttcacgtcacgctgtgtgggactcccaagggaaaccggcctgtcatcctcacctaccatgacatcggcatgaaccacaaaacctgctacaaccccctcttcaactacgaggacatgcaggagatcacccagcactttgccgtctgccacgtggacgcccctggccagcaggacggcgcagcctccttccccgcagggtacatgtacccctccatggatcagctggctgaaatgcttcctggagtccttcaacagtttgggctgaaaagcattattggcatgggaacaggagcaggcgcctacatcctaactcgatttgctctaaacaaccctgagatggtggagggccttgtccttatcaacgtgaacccttgtgcggaaggctggatggactgggccgcctccaagatctcaggatggacccaagctctgccggacatggtggtgtcccacctttttgggaaggaagaaatgcagagtaacgtggaagtggtccacacctaccgccagcacattgtgaatgacatgaaccccggcaacctgcacctgttcatcaatgcctacaacagccggcgcgacctggagattgagcgaccaatgccgggaacccacacagtcaccctgcagtgccctgctctgttggtggttggggacagctcgcctgcagtggatgccgtggtggagtgcaactcaaaattggacccaacaaagaccactctcctcaagatggcggactgtggcggcctcccgcagatctcccagccggccaagctcgctgaggccttcaagtacttcgtgcagggcatgggatacatgccctcggctagcatgacccgcctgatgcggtcccgcacagcctctggttccagcgtcacttctctggatggcacccgcagccgctcccacaccagcgagggcacccgaagccgctcccacaccagcgagggcacccgcagccgctcgcacaccagcgagggggcccacctggacatcacccccaactcgggtgctgctgggaacagcgccgggcccaagtccatggaggtctcctgctaggcggcctgcccagctgccgcccccggactctgatctctgtagtggccccctcctccccggccccttttcgccccctgcctgccatactgcgcctaactcggtattaatccaaagcttattttgtaagagtgagctctggtggagacaaatgaggtctattacgtgggtgccctctccaaaggcggggtggcggtggaccaaaggaaggaagcaagcatctccgcatcgcatcctcttccattaaccagtggccggttgccactctcctcccctccctcagagacaccaaactgccaaaaacaagacgcgtagcagcacacacttcacaaagccaagcctaggccgccctgagcatcctggttcaaacgggtgcctggtcagaaggccagccgcccacttcccgtttcctctttaactgaggagaagctgatccagtttccggaaacaaaatccttttctcatttggggaggggggtaatagtgacatgcaggcacctcttttaaacaggcaaaacaggaagggggaaaaggtgggattcatgtcgaggctagaggcatttggaacaacaaatctacgtagttaacttgaagaaaccgatttttaaagttggtgcatctagaaagctttgaatgcagaagcaaacaagcttgatttttctagcatcctcttaatgtgcagcaaaagcaggcgacaaaatctcctggctttacagacaaaaatatttcagcaaacgttgggcatcatggtttttgaaggctttagttctgctttctgcctctcctccacagccccaacctcccacccctgatacatgagccagtgattattcttgttcagggagaagatcatttagatttgttttgcattccttagaatggagggcaacattccacagctgccctggctgtgatgagtgtccttgcaggggccggagtaggagcactggggtgggggtggaattggggttactcgatgtaagggattccttgttgttgtgttgagatccagtgcagttgtgatttctgtggatcccagcttggttccaggaattttgtgtgattggcttaaatccagttttcaatcttcgacagctgggctggaacgtgaactcagtagctgaacctgtctgacccggtcacgttcttggatcctcagaactctttgctcttgtcggggtgggggtgggaactcacgtggggagcggtggctgagaaaatgtaaggattctggaatacatattccatgggactttccttccctctcctgcttcctcttttcctgctccctaacctttcgccgaatggggcagcaccactgacgtttctgggcggccagtgcggctgccaggttcctgtactactgccttgtacttttcattttggctcaccgtggattttctcataggaagtttggtcagagtgaattgaatattgtaagtcagccactgggacccgaggatttctgggaccccgcagttgggaggaggaagtagtccagccttccaggtggcgtgagaggcaatgactcgttacctgccgcccatcaccttggaggccttccctggccttgagtagaaaagtcggggatcggggcaagagaggctgagtacggatgggaaactattgtgcacaagtctttccagaggagtttcttaatgagatatttgtatttatttccagaccaataaatttgtaactttgcagcggaaaaaaaaaaaaaaaaaaaaaaaaaaaaaaaaaaaaaaaaaa

SEQ ID NO: 209 - DNA, 4934 bp, Homo sapiens; identical to SEQ ID NO: 49

SEQ ID NO: 210 - DNA, 1638 bp, Homo sapiens
tcagcgggaggggctggaccccgcgttcctcctccctgccggtccccatccttaaagcgagagtctggacgccccgcctgtgggagagagcgccgggatccggacggggagcaaccggggcaggccgtgccggctgaggaggtcctgaggctacagagctgccgcggctggcacacgagcgcctcggcactaaccgagtgttcgcgggggctgtgaggggagggccccgggcgccattgctggcggtgggagcgccgcccggtctcagcccgccctcggctgctctcctcctccggctgggaggggccgtagctcggggccgtcgccagccccggcccgggctcgagaatcaagggcctcggccgccgtcccgcagctcagtccatcgcccttgccgggcagcccgggcagagaccatgtttgacaagacgcggctgccgtacgtggccctcgatgtgctctgcgtgttgctggctggattgccttttgcaattcttacttcaaggcatacccccttccaacgaggagtattctgtaatgatgagtccatcaagtacccttacaaagaagacaccataccttatgcgttattaggtggaataatcattccattcagtattatcgttattattcttggagaaaccctgtctgtttactgtaaccttttgcactcaaattcctttatcaggaataactacatagccactatttacaaagccattggaacctttttatttggtgcagctgctagtcagtccctgactgacattgccaagtattcaataggcagactgcggcctcacttcttggatgtttgtgatccagattggtcaaaaatcaactgcagcgatggttacattgaatactacatatgtcgagggaatgcagaaagagttaaggaaggcaggttgtccttctattcaggccactcttcgttttccatgtactgcatgctgtttgtggcactttatcttcaagccaggatgaagggagactgggcaagactcttacgccccacactgcaatttggtcttgttgccgtatccatttatgtgggcctttctcgagtttctgattataaacaccactggagcgatgtgttgactggactcattcagggagctctggttgcaatattagttgctgtatatgtatcggatttcttcaaagaaagaacttcttttaaagaaagaaaagaggaggactctcatacaactctgcatgaaacaccaacaactgggaatcactatccgagcaatcaccagccttgaaaggcagcagggtgcccaggtgaagctggcctgttttctaaaggaaaatgattgccacaaggcaagaggatgcatctttcttcctggtgtacaagcctttaaagacttctgctgctgctatgcctcttggatgcacactttgtgtgtacatagttacctttaactcagtggttatctaatagctctaaactcattaaaaaaactccaagccttccaccaaaacagtgccccacctgtatacatttttattaaaaaaatgtaatgcttatgtataaacatgtatgtaatatgctttctatgaatgatgtttgatttaaatataatacatattaaaatgtatgggagaaccaaaaaaaaaaaaaaaaaa

SEQ ID NO: 211 - DNA, 3250 bp, Homo sapiens
accagggtcccggctcggggtccgggctggggaggggaacctgggcgcctgggacccgccgatgccccctgccccgcccggaggtgaaagcgggtgtgaggagcgcggcgcggcaggtcatattgaacattccagatacctatcattactcgatgctgttgataacagcaagatggctttgaactcagggtcaccaccagctattggaccttactatgaaaaccatggataccaaccggaaaacccctatcccgcacagcccactgtggtccccactgtctacgaggtgcatccggctcagtactacccgtcccccgtgccccagtacgccccgagggtcctgacgcaggcttccaaccccgtcgtctgcacgcagcccaaatccccatccgggacagtgtgcacctcaaagactaagaaagcactgtgcatcaccttgaccctggggaccttcctcgtgggagctgcgctggccgctggcctactctggaagttcatgggcagcaagtgctccaactctgggatagagtgcgactcctcaggtacctgcatcaacccctctaactggtgtgatggcgtgtcacactgccccggcggggaggacgagaatcggtgtgttcgcctctacggaccaaacttcatccttcaggtgtactcatctcagaggaagtcctggcaccctgtgtgccaagacgactggaacgagaactacgggcgggcggcctgcagggacatgggctataagaataatttttactctagccaaggaatagtggatgacagcggatccaccagctttatgaaactgaacacaagtgccggcaatgtcgatatctataaaaaactgtaccacagtgatgcctgttcttcaaaagcagtggtttctttacgctgtatagcctgcggggtcaacttgaactcaagccgccagagcaggattgtgggcggcgagagcgcgctcccgggggcctggccctggcaggtcagcctgcacgtccagaacgtccacgtgtgcggaggctccatcatcacccccgagtggatcgtgacagccgcccactgcgtggaaaaacctcttaacaatccatggcattggacggcatttgcggggattttgagacaatctttcatgttctatggagccggataccaagtagaaaaagtgatttctcatccaaattatgactccaagaccaagaacaatgacattgcgctgatgaagctgcagaagcctctgactttcaacgacctagtgaaaccagtgtgtctgcccaacccaggcatgatgctgcagccagaacagctctgctggatttccgggtggggggccaccgaggagaaagggaagacctcagaagtgctgaacgctgccaaggtgcttctcattgagacacagagatgcaacagcagatatgtctatgacaacctgatcacaccagccatgatctgtgccggcttcctgcaggggaacgtcgattcttgccagggtgacagtggagggcctctggtcacttcgaagaacaatatctggtggctgataggggatacaagctggggttctggctgtgccaaagcttacagaccaggagtgtacgggaatgtgatggtattcacggactggatttatcgacaaatgagggcagacggctaatccacatggtcttcgtccttgacgtcgttttacaagaaaacaatggggctggttttgcttccccgtgcatgatttactcttagagatgattcagaggtcacttcatttttattaaacagtgaacttgtctggctttggcactctctgccattctgtgcaggctgcagtggctcccctgcccagcctgctctccctaaccccttgtccgcaaggggtgatggccggctggttgtgggcactggcggtcaagtgtggaggagaggggtggaggctgccccattgagatcttcctgctgagtcctttccaggggccaattttggatgagcatggagctgtcacctctcagctgctggatgacttgagatgaaaaaggagagacatggaaagggagacagccaggtggcacctgcagcggctgccctctggggccacttggtagtgtccccagcctacctctccacaaggggattttgctgatgggttcttagagccttagcagccctggatggtggccagaaataaagggaccagcccttcatgggtggtgacgtggtagtcacttgtaaggggaacagaaacatttttgttcttatggggtgagaatatagacagtgcccttggtgcgagggaagcaattgaaaaggaacttgccctgagcactcctggtgcaggtctccacctgcacattgggtggggctcctgggagggagactcagccttcctcctcatcctccctgaccctgctcctagcaccctggagagtgcacatgccccttggtcctggcagggcgccaagtctggcaccatgttggcctcttcaggcctgctagtcactggaaattgaggtccatgggggaaatcaaggatgctcagtttaaggtacactgtttccatgttatgtttctacacattgctacctcagtgctcctggaaacttagcttttgatgtctccaagtagtccaccttcatttaactctttgaaactgtatcatctttgccaagtaagagtggtggcctatttcagctgctttgacaaaatgactggctcctgacttaacgttctataaatgaatgtgctgaagcaaagtgcccatggtggcggcgaagaagagaaagatgtgttttgttttggactctctgtggtcccttccaatgctgtgggtttccaaccaggggaagggtcccttttgcattgccaagtgccataaccatgagcactactctaccatggttctgcctcctggccaagcaggctggtttgcaagaatgaaatgaatgattctacagctaggacttaaccttgaaatggaaagtcatgcaatcccatttgcaggatctgtctgtgcacatgcctctgtagagagcagcattcccagggaccttggaaacagttggcactgtaaggtgcttgctccccaagacacatcctaaaaggtgttgtaatggtgaaaacgtcttccttctttattgccccttcttatttatgtgaacaactgtttgtctttttttgtatcttttttaaactgtaaagttcaattgtgaaaatgaatatcatgcaaataaattatgcaatttttttttcaaagtaaaaaaaaaa

SEQ ID NO: 212 - DNA, 2264 bp, Homo sapiens
ggtctccttggcatgcacctattcagactgttagtattatgtatttacttcaaattttagcagttatattttaacttgattgatttttcctcagatataagtatgagaaatgacagaaagaaacaacaactggaaaagaagcattgcataagaccaggatgtctctgaaatggacgtcagtctttctgctgatacagctcagttgttactttagctctggaagctgtggaaaggtgctagtgtggcccacagaatacagccattggataaatatgaagacaatcctggaagagcttgttcagaggggtcatgaggtgactgtgttgacatcttcggcttctactcttgtcaatgccagtaaatcatctgctattaaattagaagtttatcctacatctttaactaaaaattatttggaagattctcttctgaaaattctcgatagatggatatatggtgtttcaaaaaatacattttggtcatatttttcacaattacaagaattgtgttgggaatattatgactacagtaacaagctctgtaaagatgcagttttgaataagaaacttatgatgaaactacaagagtcaaagtttgatgtcattctggcagatgcccttaatccctgtggtgagctactggctgaactatttaacataccctttctgtacagtcttcgattctctgttggctacacatttgagaagaatggtggaggatttctgttccctccttcctatgtacctgttgttatgtcagaattaagtgatcaaatgattttcatggagaggataaaaaatatgatacatatgctttattttgacttttggtttcaaatttatgatctgaagaagtgggaccagttttatagtgaagttctaggaagacccactacattatttgagacaatggggaaagctgaaatgtggctcattcgaacctattgggattttgaatttcctcgcccattcttaccaaatgttgattttgttggaggacttcactgtaaaccagccaaacccctgcctaaggaaatggaagagtttgtgcagagctctggagaaaatggtattgtggtgttttctctggggtcgatgatcagtaacatgtcagaagaaagtgccaacatgattgcatcagcccttgcccagatcccacaaaaggttctatggagatttgatggcaagaagccaaatactttaggttccaatactcgactgtacaagtggttaccccagaatgaccttcttggtcatcccaaaaccaaagcttttataactcatggtggaaccaatggcatctatgaggcgatctaccatgggatccctatggtgggcattcccttgtttgcggatcaacatgataacattgctcacatgaaagccaagggagcagccctcagtgtggacatcaggaccatgtcaagtagagatttgctcaatgcattgaagtcagtcattaatgaccctgtctataaagagaatgtcatgaaattatcaagaattcatcatgaccaaccaatgaagcccctggatcgagcagtcttctggattgagtttgtcatgcgccacaaaggagccaagcaccttcgagtcgcagctcacaacctcacctggatccagtaccactctttggatgtgatagcattcctgctggcctgcgtggcaactgtgatatttatcatcacaaaattttgcctgttttgtttccgaaagcttgccaaaaaaggaaagaagaagaaaagagattagttatatcaaaagcctgaagtggaatgactgaaagatgggactcctcctttatttcagcatggagggttttaaatggaggatttcctttttcctgtgacaaaacatcttttcacaacttaccttgttaagacaaaatttattttccagggatttaatacgtactttagctgaattattctatgtcaatgatttttaagctatgaaaaatacaatggggggaaggatagcatttggagatatacctaatgttaaatgacgagttactggatgcagcacgccaacatggcacatgtatacatatgtagctaacctgcacgttgtgcacatgtaccctaaaacttaaagtataatttaaaaaaagcaaaaaaaaaaaatacaactcttttttttaaaccaggaaggaaaatgtgaacatggaaacaacttctagtattggatctgaaaataaagtgtcatccaagccataaaaaaaaaagaaaagaaaaataaaaataatataaaaccttaaaaaaa

SEQ ID NO: 213 - DNA, 3024 bp, Homo sapiens
atgctcagggttccggagccgcggcccggggaggccgagacgctggcagagaccgagccagaaaggcacttggggtcttatctgttggactctgaaaacacttcaggcgcccttccaaggcttccccaaacccctaagcagccgcagaagcgctcccgagctgccttctcccacactcaggtgatcgagttggagaggaagttcagccatcagaagtacctgtcggcccctgaacgggcccacctggccaagaacctcaagctcacggagacccaagtgaagatatggttccagaacagacgctataagactaagcgaaagcagctctcctcggagctgggagacttggagaagcactcctctttgccggccctgaaagaggaggccttctcccgggcctccctggtctccgtgtataacagctatccttactacccatacctgtactgcgtgggcagctggagcccagctttttggtaatgccagctcaggtgacaaccattatgatcaaaaactgccttccccagggtgtctctatgaaaagcacaaggggccaaggtcagggagcaagaggtgtgcacaccaaagctattggagatttgcgtggaaatctcagattcttcactggtgagacaatgaaacaacagagacagtgaaagttttaatacctaagtcattcctccagtgcatactgtaggtcattttttttgcttctggctacctgtttgaaggggagagagggaaaatcaagtggtattttccagcactttgtatgattttggatgagttgtacacccaaggattctgttctgcaactccatcctcctgtgtcactgaatatcaactctgaaagagcaaacctaacaggagaaaggacaaccaggatgaggatgtcaccaactgaattaaacttaagtccagaagcctcctgttggccttggaatatggccaaggctctctctgtccctgtaaaagagaggggcaaatagagagtctccaagagaacgccctcatgctcagcacatatttgcatgggagggggagatgggtgggaggagatgaaaatatcagcttttcttattcctttttattccttttaaaatggtatgccaacttaagtatttacagggtggcccaaatagaacaagatgcactcgctgtgattttaagacaagctgtataaacagaactccactgcaagagggggggccgggccaggagaatctccgcttgtccaagacaggggcctaaggagggtctccacactgctgctaggggctgttgcatttttttattagtagaaagtggaaaggcctcttctcaacttttttcccttgggctggagaatttagaatcagaagtttcctggagttttcaggctatcatatatactgtatcctgaaaggcaacataattcttccttccctccttttaaaattttgtgttcctttttgcagcaattactcactaaagggcttcattttagtccagatttttagtctggctgcacctaacttatgcctcgcttatttagcccgagatctggtctttttttttttttttttttttttttttccgtctccccaaagctttatctgtcttgactttttaaaaaagtttgggggcagattctgaattggctaaaagacatgcatttttaaaactagcaactcttatttctttcctttaaaaatacatagcattaaatcccaaatcctatttaaagacctgacagcttgagaaggtcactactgcatttataggaccttctggtggttctgctgttacgtttgaagtctgacaatccttgagaatctttgcatgcagaggaggtaagaggtattggattttcacagaggaagaacacagcgcagaatgaagggccaggcttactgagctgtccagtggagggctcatgggtgggacatggaaaagaaggcagcctaggccctggggagcccagtccactgagcaagcaagggactgagtgagccttttgcaggaaaaggctaagaaaaaggaaaaccattctaaaacacaacaagaaactgtccaaatgctttgggaactgtgtttattgcctataatgggtccccaaaatgggtaacctagacttcagagagaatgagcagagagcaaaggagaaatctggctgtccttccattttcattctgttatctcaggtgagctggtagaggggagacattagaaaaaaatgaaacaacaaaacaattactaatgaggtacgctgaggcctgggagtctcttgactccactacttaattccgtttagtgagaaacctttcaattttcttttattagaagggccagcttactgttggtggcaaaattgccaacataagttaatagaaagttggccaatttcaccccattttctgtggtttgggctccacattgcaatgttcaatgccacgtgctgctgacaccgaccggagtactagccagcacaaaaggcagggtagcctgaattgctttctgctctttacatttcttttaaaataagcatttagtgctcagtccctactgagtactctttctctcccctcctctgaatttaattctttcaacttgcaatttgcaaggattacacatttcactgtgatgtatattgtgttgcaaaaaaaaaaaaaaagtgtctttgtttaaaattacttggtttgtgaatccatcttgctttttccccattggaactagtcattaacccatctctgaactggtagaaaaacatctgaagagctagtctatcagcatctgacaggtgaattggatggttctcagaaccatttcacccagacagcctgtttctatcctgtttaataaattagtttgggttctctacatgcataacaaaccctgctccaatctgtcacataaaagtctgtgacttgaagtttagtcagcacccccaccaaactttatttttctatgtgttttttgcaacatatgagtgttttgaaaataaagtacccatgtctttattagatttaaaaaaaaaaaaaaaaa
